(19) United States
(12) Patent Application Publication
(10) Pub. No.: US 2011/0135573 A1
(43) Pub. Date: Jun. 9, 2011

(54) METALLOPROTEINASE 9 AND METALLOPROTEINASE 2 BINDING PROTEINS

(75) Inventor: Laetitia Devy, Ferney-Voltaire (FR)

(73) Assignee: DYAX CORP., Cambridge, MA (US)

(21) Appl. No.: 12/874,544

(22) Filed: Sep. 2, 2010

Related U.S. Application Data
(60) Provisional application No. 61/239,660, filed on Sep. 3, 2009.

(51) Int. Cl. A61K 49/00; C07K 16/40; A61K 39/395; G01N 33/573; C12N 9/99; A61P 37/00; A61P 27/02; A61P 17/00

(52) U.S. Cl. 424/9.1; 530/389.1; 424/158.1; 435/7.4; 435/184

(57) ABSTRACT

Proteins that bind to matrix metalloproteinase 9 and to matrix metalloproteinase 2 and methods of using such proteins are described.

### CROSS REFERENCE TO RELATED APPLICATIONS

[0001] This application claims priority to U.S. Application Ser. No. 61/239,660, filed on Sep. 3, 2009. The disclosure of the prior application is considered part of (and is incorporated by reference in) the disclosure of this application.

### BACKGROUND

[0002] Matrix Metalloproteinases (MMPs) are a family of zinc metalloendopeptidases secreted by cells or membrane bound/associated, and are responsible for much of the turnover of matrix components. The MMP family consists of at least 26 members, all of which share a common catalytic core with a zinc molecule in the active site.

### SUMMARY

[0003] This disclosure relates, inter alia, to proteins that bind both MMP-9 and MMP-2, herein referred to as “MMP-9/MMP-2 binding proteins,” and methods of identifying and using such proteins. These proteins include antibodies and antibody fragments (e.g., primate antibodies and Fabs, especially human antibodies and Fabs) that bind to MMP-9 (e.g., human MMP-9) and MMP-2 (e.g., human MMP-2). Some of the MMP-9/MMP-2 binding proteins are capable of binding to MMP-9 and to MMP-2, and, e.g., inhibiting catalytic activity. Each binding site on the binding protein can bind either MMP-9 or MMP-2, but not both at the same time. However, in some embodiments, a sufficient quantity of a MMP-9/MMP-2 binding protein can bind and inhibit both MMP-9 and MMP-2 at the same time, and e.g., inhibit catalytic activity of both MMP-9 and MMP-2 at the same time.

[0004] In some embodiments, these proteins include antibodies and antibody fragments (e.g., primate antibodies and Fabs, especially human antibodies and Fabs) that inhibit MMP-9 (e.g., human MMP-9) (e.g., inhibit the catalytic activity of MMP-9) and MMP-2 (e.g., human MMP-2) (e.g., inhibit the catalytic activity of MMP-2). The MMP-9/MMP-2 binding proteins can be used in the treatment of diseases, particularly human disease, such as cancer, inflammation, heart failure, septic shock, neuropathic pain, or macular degeneration, in which excess or inappropriate activity of MMP-9 and MMP-2 features. In many cases, the proteins have tolerable, low, or no toxicity.

[0005] This disclosure also relates, inter alia, to proteins that bind MMP-9, herein referred to as “MMP-9 binding proteins,” and methods of identifying and using such proteins. These proteins include antibodies and antibody fragments (e.g., primate antibodies and Fabs, especially human antibodies and Fabs) that bind to MMP-9 (e.g., human MMP-9) and that do not bind to MMP-2 (e.g., human MMP-2), e.g., greater than background levels of binding. In some embodiments, these proteins include antibodies and antibody fragments (e.g., primate antibodies and Fabs, especially human antibodies and Fabs) that inhibit MMP-9 (e.g., human MMP-9) (e.g., inhibit the catalytic activity of MMP-9) and that do not inhibit MMP-2 (e.g., human MMP-2) (e.g., inhibit the catalytic activity of MMP-2). The MMP-9 binding proteins can be used in the treatment of diseases, particularly human disease, such as cancer, inflammation, heart failure, septic shock, neuropathic pain, inflammatory pain, or macular degeneration, in which excess or inappropriate activity of MMP-9 features. In many cases, the proteins have tolerable low or no toxicity.

[0006] In some aspects, the disclosure relates to proteins (e.g., antibodies, peptides and Kunitz domain proteins) that bind MMP-9 and MMP-2, in particular, proteins (e.g., antibodies (e.g., human antibodies), peptides and Kunitz domain proteins) that bind and inhibit MMP-9 and bind and inhibit MMP-2.

[0007] In one embodiment, the disclosure provides a human antibody that binds to human MMP-9 and to MMP-2, e.g., the antibody is capable of binding to human MMP-9 or to human MMP-2. In one embodiment, the human antibody is an inhibitor of the catalytic activity of MMP-9 and is an inhibitor of the catalytic activity of MMP-2, e.g., it can inhibit the catalytic activity of MMP-9 or MMP-2. The antibody can be, e.g., an IgG1, IgG2, IgG3, IgG4, Fab, Fab2′, scFv, minibody, scFv::Fc fusion, Fab::HSA fusion, HSA::Fab fusion, Fab::HSA::Fab fusion, or other molecule that comprises the antigen combining site of one of the antibodies herein listed. In one embodiment, the antibody is used to guide a nano-particle or toxin to a cell expressing MMP-9 or MMP-2 on the cell surface. In one embodiment, the antibody causes effector functions (CDC or ADCC) to kill the cell which expresses MMP-9 and/or MMP-2.

[0008] In some embodiments, the VH and VL regions of the binding proteins (e.g., Fabs) can be provided as IgG, Fab, Fab2, Fab2′, scFv, PEGylated Fab, PEGylated scFv, PEGylated Fab2, VH::CH1::HSA+LC, HSA::VH::CH1+LC, LC::HSA+VH::CH1, HSA::LC+VH::CH1, or other appropriate construct.

[0009] In one aspect, the disclosure features a protein (e.g., an isolated protein) that binds to MMP-9 (e.g., human MMP-9) and MMP-2 (e.g., human MMP-2) and includes at least one immunoglobulin variable region. For example, the protein includes a heavy chain (HC) immunoglobulin variable domain sequence and a light chain (LC) immunoglobulin variable domain sequence. The protein is capable of binding to MMP-9 (e.g., human MMP-9). In some embodiments, the protein is capable of binding to MMP-2 (e.g., human MMP-2). For example, the protein binds MMP-9 or MMP-2, it does not bind both MMP-9 and MMP-2 at the same time. In one embodiment, the protein binds to and inhibits MMP-9 (e.g., inhibits MMP-9 catalytic activity), e.g., of human MMP-9, or binds to and inhibits MMP-2 (e.g., inhibits MMP-2 catalytic activity), e.g., of human MMP-2. In one embodiment, the protein binds an epitope bound by a protein described herein, or an epitope that overlaps with such epitope, and binding to such epitope inhibits either MMP-9 or MMP-2. In one embodiment, the protein binds to at least one or more amino acids of residues Gly128 to Gly296 of MMP9 and/or the protein binds to at least one or more amino acids of residues Arg 120 to Pro288 of MMP2.

[0010] In some embodiments, the protein binds to human MMP-9 specifically, and not to MMP-9 from another species (e.g., the protein does not bind to MMP-9 from another species with greater than background levels of binding). In some embodiments, the protein binds to human MMP-2 specifically, and not to MMP-2 from another species (e.g., the protein does not bind to MMP-2 from another species with greater than background levels of binding).

[0011] In some embodiments, the protein is capable of binding to human MMP-9 or human MMP-2 and also is capable of binding to MMP-9 or MMP-2 of a non-human species selected from the group consisting of Mus musculus, Rattus norvegus, and Macaca fascicularis. In some embodiments, the Ki,app for the non-human species MMP-9 or MMP-2 is no more than 10-fold higher than the Ki,app for the human MMP9 or MMP-2.

[0012] In some embodiments, the protein binds MMP-9 and MMP-2 specifically, and not to any other matrix metalloproteinase (e.g., the protein does not bind to any other matrix metalloproteinase with greater than background levels of binding).

[0013] Such binding proteins can be conjugated to a drug (e.g., to form an MMP-9/MMP-2 binding protein-drug conjugate) and used therapeutically. This disclosure relates, in part, to MMP-9/MMP-2 binding protein-drug conjugates, the preparation of these conjugates, and uses thereof. The conjugates can be used, e.g., in the treatment of disorders, e.g., for the treatment of cancer, inflammation, heart failure, septic shock, neuropathic pain, or macular degeneration. Targeting (e.g., and killing) of the MMP-9 and/or MMP-2 expressing cells and/or tumors, e.g., with high affinity binding protein-drug conjugates can be a potent therapy in the treatment of diseases, e.g., cancer, inflammation, heart failure, septic shock, neuropathic pain, or macular degeneration.

[0014] The protein can include one or more of the following characteristics: (a) a human CDR or human framework region; (b) the HC immunoglobulin variable domain sequence comprises one or more (e.g., 1, 2, or 3) CDRs that are at least 85, 88, 90, 91, 92, 93, 94, 95, 96, 97, 98, 99, or 100% identical to a CDR of a HC variable domain described herein; (c) the LC immunoglobulin variable domain sequence comprises one or more (e.g., 1, 2, or 3) CDRs that are at least 85, 88, 90, 91, 92, 93, 94, 95, 96, 97, 98, 99, or 100% identical to a CDR of a LC variable domain described herein; (d) the LC immunoglobulin variable domain sequence is at least 85, 88, 90, 91, 92, 93, 94, 95, 96, 97, 98, 99, or 100% identical to a LC variable domain described herein; (e) the HC immunoglobulin variable domain sequence is at least 85, 88, 90, 91, 92, 93, 94, 95, 96, 97, 98, 99, or 100% identical to a HC variable domain described herein; (f) the protein binds an epitope bound by a protein described herein, or an epitope that overlaps with such epitope; and (g) a primate CDR or primate framework region.

[0015] The protein can bind to MMP-9, e.g., human MMP-9, and MMP-2, e.g., human MMP-2 with a binding affinity of at least 10⁵, 10⁶, 10⁷, 10⁸, 10⁹, 10¹⁰ and 10¹¹ M⁻¹. In one embodiment, the protein binds to MMP-9 and/or MMP-2 with a K_{off} slower than 1×10⁻³, 5×10⁻⁴ s⁻¹, or 1×10⁻⁴ s⁻¹. In one embodiment, the protein binds to MMP-9 and/or MMP-2 with a Kₒₙ faster than 1×10², 1×10³, or 5×10³ M⁻¹ s⁻¹. In one embodiment, the protein inhibits human MMP-9 activity and/or MMP-2, e.g., with a Ki of less than 10⁻⁵, 10⁻⁶, 10⁻⁷, 10⁻⁸, 5×10⁻⁹, 10⁻⁹, 5×10⁻¹⁰ and 10⁻¹⁰ M. In one embodiment, the protein inhibits human MMP-9 activity and MMP-2 activity, e.g., with a Ki of less than 10⁻⁹, 5×10⁻⁹, 10⁻¹⁰, 5×10⁻¹⁰ M. The protein can have, for example, an IC50 of less than 100 nM, 10 nM or 1 nM. In some embodiments, the protein has an IC50 of about 1.8 nM. The affinity of the protein for MMP-9 and/or MMP-2 can be characterized by a K_{D} of less than 100 nm, less than 10 nM, or about 3 nM (e.g., 3.1 nM), about 5 nM (e.g., 5 nM), about 6 nm (e.g., 5.9 nM), about 7 nM (e.g., 7.1 nM), or about 10 nM (e.g., 9.6 nM).

[0016] In some embodiments, the protein has a K_{D} <20 nM for both human MMP-9 and human MMP-2. In some embodiments, the protein has a K_{D} 0.2 nM for both human MMP-9 and human MMP-2.

[0017] In some embodiments, the protein has a t1/2 of at least about 10 minutes (e.g., 11 minutes), at least about 20 minutes (e.g., 18 minutes), at least about 25 minutes (e.g., 25 minutes), at least about 35 minutes (e.g., 33 minutes), or at least about 60 minutes (e.g., 57 minutes).

[0018] In one embodiment, the protein binds the catalytic domain of human MMP-9, e.g., the protein contacts residues in or near the active site of MMP-9. In one embodiment, the protein binds the catalytic domain of human MMP-2, e.g., the protein contacts residues in or near the active site of MMP-2.

[0019] In some embodiments, the protein does not contact residues in or near the active site of MMP-9 but instead binds elsewhere on MMP-9 and causes a steric change in MMP-9 that affects (e.g., inhibits) its activity. In some embodiments, the protein does not contact residues in or near the active site of MMP-2 but instead binds elsewhere on MMP-2 and causes a steric change in MMP-2 that affects (e.g., inhibits) its activity. In some embodiments, the protein merely binds MMP-9 and does not inhibit its activity (e.g. antibodies M0076-D03 or M0078-G07).

[0020] In a preferred embodiment, the protein binds MMP-9 and MMP-2. In one embodiment, the protein is a human antibody having the light and heavy chains of the antibody M0237-D02, X0106-A01, X0106-B02, X0106-C03, X0106-E04, X0106-F05, or other MMP-9/MMP-2 binding antibodies described herein. In a preferred embodiment, the protein is a human antibody having a heavy chain comprising the heavy chain of M0237-D02, X0106-A01, X0106-B02, X0106-C03, X0106-E04, X0106-F05, or other MMP-9/MMP-2 binding antibodies described herein. In a preferred embodiment, the protein is a human antibody having a light chain comprising the light chain of M0237-D02, X0106-A01, X0106-B02, X0106-C03, X0106-E04, X0106-F05, or other MMP-9/MMP-2 binding antibodies described herein. In a preferred embodiment, the protein is a human antibody having one or more (e.g., 1, 2, or 3) heavy chain CDRs picked from the corresponding CDRs of the heavy chain of M0237-D02, X0106-A01, X0106-B02, X0106-C03, X0106-E04, X0106-F05, or other MMP-9/MMP-2 binding antibodies described herein. In a preferred embodiment, the protein is a human antibody having one or more (e.g., 1, 2, or 3) light chain CDRs picked from the light chain of M0237-D02, X0106-A01, X0106-B02, X0106-C03, X0106-E04, X0106-F05, or other MMP-9/MMP-2 binding antibodies described herein.

[0021] In a more preferred embodiment, the protein is a human antibody having the light and heavy chains of M0237-D02, X0106-A01, X0106-B02, X0106-C03, X0106-E04, X0106-F05, or other MMP-9/MMP-2 binding antibodies described herein. In a preferred embodiment, the protein is a primate antibody that binds and inhibits MMP-9 and MMP-2 with a K_{D} less than 5 nM and that competes for binding to MMP-9 or MMP-2 with one of the antibodies in the group consisting of M0237-D02, X0106-A01, X0106-B02, X0106-C03, X0106-E04 X0106-F05, or other MMP-9/MMP-2 binding antibodies described herein.

[0022] In one embodiment, the HC and LC variable domain sequences are components of the same polypeptide chain. In another, the HC and LC variable domain sequences are components of different polypeptide chains. For example, the protein is an IgG, e.g., IgG1, IgG2, IgG3, or IgG4. The protein can be a soluble Fab (sFab). In other implementations the protein includes a Fab2′, scFv, minibody, scFv::Fc fusion, Fab::HSA fusion, HSA::Fab fusion, Fab::HSA::Fab fusion, or other molecule that comprises the antigen combining site of one of the binding proteins herein. The VH and VL regions of these Fabs can be provided as IgG, Fab, Fab2, Fab2′, scFv, PEGylated Fab, PEGylated scFv, PEGylated Fab2, VH::CH1::HSA+LC, HSA::VH::CH1+LC, LC::HSA+VH::CH1, HSA::LC+VH::CH1, or other appropriate construction.

[0023] In one embodiment, the protein is a human or humanized antibody or is non-immunogenic in a human. For example, the protein includes one or more human antibody framework regions, e.g., all human framework regions. In one embodiment, the protein includes a human Fc domain, or an Fc domain that is at least 95, 96, 97, 98, or 99% identical to a human Fc domain.

[0024] In one embodiment, the protein is a primate or primatized antibody or is non-immunogenic in a human. For example, the protein includes one or more primate antibody framework regions, e.g., all primate framework regions. In one embodiment, the protein includes a primate Fc domain, or an Fc domain that is at least 95, 96, 97, 98, or 99% identical to a primate Fc domain. “Primate” includes humans (Homo sapiens), chimpanzees (Pan troglodytes and Pan paniscus (bonobos)), gorillas (Gorilla gorilla), gibons, monkeys, lemurs, aye-ayes (Daubentonia madagascariensis), and tarsiers.

[0025] In certain embodiments, the protein includes no sequences from mice or rabbits (e.g., is not a murine or rabbit antibody).

[0026] In one embodiment, the protein is capable of binding to tumor cells expressing MMP-9, e.g., to Colo205 (a human colorectal carcinoma cell line), or MCF-7 (a human breast adenocarcinoma cell line) cells.

[0027] In one embodiment, protein is physically associated with a nanoparticle, and can be used to guide a nanoparticle to a cell expressing MMP-9 and/or MMP-2 on the cell surface. In one embodiment, the protein causes effector cells (CDC or ADCC) to kill a cell which expresses MMP-9 and/or MMP-2.

[0028] In some aspects, the antibody disclosed herein inhibits human MMP-9 (hMMP-9), human MMP-2 (hMMP-2), mouse MMP-9 (mMMP-9), and mouse MMP-2 (mMMP-2). In some embodiments, inhibition of MMP-9 and MMP-2 from other species (e.g., rat and cynomolgus monkeys) is also seen. Inhibition of MMP-9 and MMP-2 relate to the observation that MMP-9 and MMP-2 are both found in the conditions to be treated. Having activity toward human and mouse enzymes relates to the need to test the active pharmaceutical ingredient in mice before treating human subjects. Thus, in some preferred embodiments of the invention, the binding protein (e.g., antibody) has an apparent Kᵢ for hMMP-9 less than 20 nM, 15 nM, 10 nM, 5 nM or 1 nM, an apparent Kᵢ for hMMP-2 less than 20 nM, 15 nM, 10 nM, 5 nM or 1 nM, an apparent Kᵢ for mMMP-9 less than 20 nM, 15 nM, 10 nM, 5 nM or 1 nM, and an apparent Kᵢ for mMMP-2 less than 20 nM, 15 nM, 10 nM, 5 nM or 1 nM.

[0029] In some embodiment, these measurements are for Fabs. Converting a Fab into an IgG can lower the apparent Kᵢ (i.e., increase the degree of inhibition). The affinity for human MMP-9 and MMP-2 are more important than are those for the mouse since the stronger the affinity, the more effective is the drug at any given dose level. Hence, a Fab that has an apparent Kᵢ for hMMP-9 less than 1 nM, an apparent Kᵢ for hMMP-2 less than 1 nM, an apparent Kᵢ for mMMP-9 less than 5 nM, and an apparent Kᵢ for mMMP-2 less than 5 nM is an embodiment. A Fab that has an apparent Kᵢ for hMMP-9 less than 0.1 nM, an apparent Kᵢ for hMMP-2 less than 0.1 nM, an apparent Kᵢ for mMMP-9 less than 1 nM, and an apparent Kᵢ for mMMP-2 less than 1 nM is a preferred embodiment. Additionally, a Fab that has an apparent Kᵢ for hMMP-9 less than 0.1 nM, an apparent Kᵢ for hMMP-2 less than 0.1 nM, an apparent Kᵢ for mMMP-9 less than 5 nM, and an apparent Kᵢ for mMMP-2 less than 5 nM is a preferred embodiment.

[0030] In some aspects, the disclosure features an antibody (e.g., human antibody) that binds and inhibits (e.g., inhibits the catalytic activity of) hMMP9 with an apparent Ki (Ki app) of <1 nM, hMMP2 with Ki app of <1 nM, mMMP9 with Ki app of <1 nM, and/or mMMP2 with Ki app of <1 nM. In some embodiments, the antibody binds and inhibits hMMP9 with Ki app of <1 nM, hMMP2 with Ki app of <1 nM, mMMP9 with Ki app of <1 nM, and mMMP2 with Ki app of <1 nM.

[0031] In some aspects, the disclosure features an antibody (e.g., human antibody) that binds and inhibits hMMP9 with Ki app of <0.1 nM, hMMP2 with Ki app of <0.1 nM, mMMP9 with Ki app of <1 nM, and/or mMMP2 with Ki app of <1 nM. In some embodiments, the antibody binds and inhibits hMMP9 with Ki app of <0.1 nM, hMMP2 with Ki app of <0.1 nM, mMMP9 with Ki app of <1 nM, and mMMP2 with Ki app of <1 nM.

[0032] In some aspects, the disclosure features an antibody (e.g., human antibody) that binds and inhibits hMMP9 with Ki app of <1 nM, hMMP2 with Ki app of <1 nM, mMMP9 with Ki app of <5 nM, and mMMP2 with Ki app of <5 nM. In some embodiments, the antibody binds and/or inhibits hMMP9 with Ki app of <1 nM, hMMP2 with Ki app of <1 nM, mMMP9 with Ki app of <5 nM, and mMMP2 with Ki app of <5 nM.

[0033] In some aspects, the disclosure features an isolated protein that is a human antibody or a humanized antibody that is capable of binding human MMP9 with Ki,app <1 nM or human MMP-2 with Ki,app <1 nM or mouse MMP9 with Ki,app <about 5 nM or mouse MMP2 with Ki,app <about 5 nM.

[0034] In some aspects, the disclosure features an isolated protein that is a human antibody or a humanized antibody that is capable of binding human MMP9 with Ki,app <1 nM or human MMP-2 with Ki,app <1 nM.

[0035] In some aspects, the disclosure features an antibody (e.g., human antibody) that binds and inhibits hMMP9 with Ki app <0.1 nM, hMMP2 with Ki app <0.1 nM, mMMP9 with Ki app <5 nM, and/or mMMP2 with Ki app <5 nM. In some embodiments, the antibody binds and inhibits hMMP9 with Ki app <0.1 nM, hMMP2 with Ki app <0.1 nM, mMMP9 with Ki app <5 nM, and mMMP2 with Ki app <5 nM.

[0036] In some aspects, the antibody disclosed herein inhibits human MMP-9 (hMMP-9) and human MMP-2 (hMMP-2), but does not inhibit mouse MMP-9 (mMMP-9), and/or mouse MMP-2 (mMMP-2) (e.g., the antibody inhibits mMMP-9 and/or mMMP-2 less effectively (e.g., 5-, 10-, 50-, 100-, or 1000-fold less or not at all, e.g., as compared to a negative control) than it inhibits hMMP-9 and/or hMMP-2. In some embodiments, the antibody disclosed herein inhibits human MMP-9 (hMMP-9) with a Ki of thess than 20 nM, 15 nM, 10 nM, 5 nM, 1 nM, 0.5 nM, 0.1 nM and inhibits human MMP-2 (hMMP-2) with a Ki of thess than 20 nM, 15 nM, 10 nM, 5 nM, 1 nM, 0.5 nM, 0.1 nM, but does not inhibit mouse MMP-9 (mMMP-9) and/or mouse MMP-2 (mMMP-2).

[0037] In some aspects, the disclosure features an antibody (e.g., human antibody) that binds and inhibits (e.g., inhibits the catalytic activity of) hMMP9 with an apparent Ki (Ki app) of <1 nM and hMMP2 with Ki app of <1 nM, but does not inhibit mMMP9 and/or mMMP2.

[0038] In some aspects, the disclosure features an antibody (e.g., human antibody) that binds and inhibits hMMP9 with Ki app of <0.1 nM and hMMP2 with Ki app of <0.1 nM, but does not inhibit mMMP9 and/or mMMP2.

[0039] In some aspects, the disclosure features an antibody (e.g., human antibody) that binds and inhibits hMMP9 with Ki app of <1 nM and hMMP2 with Ki app of <1 nM, but does not inhibit mMMP9 and/or mMMP2.

[0040] In some aspects, the disclosure features an antibody (e.g., human antibody) that binds and inhibits hMMP9 with Ki app <0.1 nM and hMMP2 with Ki app <0.1 nM.

[0041] In another aspect, the disclosure features an MMP-9/MMP-2 binding protein that is a competitive inhibitor of MMP-9 and MMP-2. In some embodiments, the binding protein competes with an MMP-9 substrate and/or an MMP-2 substrate (e.g., collagen, fibronectin and elastin), e.g., binds to the same epitope as the substrate, e.g., and prevents substrate binding.

[0042] In some aspects, the disclosure features a method of inhibiting an interaction between MMP-9 and/or MMP-2 and a substrate (e.g., collagen, fibronectin or elastin). The method includes contacting an a binding protein described herein with MMP-9 and/or MMP-2 (e.g., in vitro or in vivo), wherein the binding protein binds to MMP-9 and/or MMP-2 and thereby prevents the binding of a substrate to MMP-9 and/or MMP-2. In some embodiments, the binding protein binds to the same epitope on MMP-9 or MMP-2 as the substrate, e.g., the binding protein is a competitive inhibitor. In some embodiments, the binding protein does not bind the same epitope as the substrate but causes a steric change in MMP-9 or MMP-2 that decreases or inhibits the ability of the substrate to bind.

[0043] In one aspect, the disclosure features an MMP-9/MMP-2 binding protein-drug conjugate that includes an MMP-9/MMP-2 binding protein, e.g., an MMP-9/MMP-2 binding protein described herein, and a drug.

[0044] In one embodiment, the binding protein comprises at least one immunoglobulin variable region, and/or the protein binds to and/or inhibits MMP-9, e.g., inhibits MMP-9 catalytic activity and MMP-2, e.g., inhibits MMP-2 catalytic activity.

[0045] In one embodiment, the drug is a cytotoxic or cytostatic agent. The cytotoxic agent can be, e.g., selected from the group consisting of an auristatin, a DNA minor groove binding agent, a DNA minor groove alkylating agent, an enediyne, a lexitropsin, a duocarmycin, a taxane, a puromycin, a dolastatin, a podophyllotoxin, a baccatin derivative, a cryptophysin, a combretastatin, a maytansinoid, and a vinca alkaloid. In one embodiment, the cytotoxic agent is an auristatin and, e.g., the auristatin is selected from AFP, MMAF, MMAE, AEB, AEVB and auristatin E. In one embodiment, the auristatin is AFP or MMAF. In another embodiment, the cytotoxic agent is a maytansinoid and, e.g., the maytansinoid is selected from a maytansinol, maytansine, DM1, DM2, DM3 and DM4. In one embodiment, the maytansinoid is DM1. In another embodiment, the cytotoxic agent is selected from paclitaxel, docetaxel, CC-1065, SN-38, topotecan, morpholino-doxorubicin, rhizoxin, cyanomorpholino-doxorubicin, dolastatin-10, echinomycin, combretatstatin, calicheamicin, and netropsin. In one embodiment, the cytotoxin is an auristatin, a maytansinoid, or calicheamicin.

[0046] In one embodiment, the cytotoxic agent is an antitubulin agent and, e.g., the antitubulin agent is selected from AFP, MMAP, MMAE, AEB, AEVB, auristatin E, vincristine, vinblastine, vindesine, vinorelbine, VP-16, camptothecin, paclitaxel, docetaxel, epothilone A, epothilone B, nocodazole, colchicines, colcimid, estramustine, cemadotin, discodermolide, maytansinol, maytansine, DM1, DM2, DM3, DM4 and eleutherobin.

[0047] In one embodiment, the MMP-9/MMP-2 binding protein (e.g., antibody) is conjugated to the drug (e.g., cytotoxic agent) via a linker. In one embodiment, the linker is cleavable under intracellular conditions, e.g., the cleavable linker is a peptide linker cleavable by an intracellular protease. In one embodiment, the linker is a peptide linker, e.g., a dipeptide linker, e.g., a val-cit linker or a phe-lys linker. In one embodiment, the cleavable linker is hydrolyzable at a pH of less than 5.5, e.g., the hydrolyzable linker is a hydrazone linker. In another embodiment, the cleavable linker is a disulfide linker.

[0048] In some aspects, the disclosure relates to proteins (e.g., antibodies and peptides) that bind MMP-9, in particular, proteins (e.g., antibodies (e.g., human antibodies) and peptides) that bind and inhibit MMP-9.

[0049] In one embodiment, the disclosure provides a human antibody that binds to human MMP-9, e.g., the antibody is capable of binding to human MMP-9. In one embodiment, the human antibody is an inhibitor of the catalytic activity of MMP-9, e.g., it can inhibit the catalytic activity of MMP-9. The antibody can be, e.g., an IgG1, IgG2, IgG3, IgG4, Fab, Fab2′, scFv, minibody, scFv::Fc fusion, Fab::HSA fusion, HSA::Fab fusion, Fab::HSA::Fab fusion, or other molecule that comprises the antigen combining site of one of the antibodies herein listed. In one embodiment, the antibody is used to guide a nano-particle or toxin to a cell expressing MMP-9 on the cell surface. In one embodiment, the antibody causes effector functions (CDC or ADCC) to kill the cell which expresses MMP-9.

[0050] In some embodiments, the VH and VL regions of the binding proteins (e.g., Fabs) can be provided as IgG, Fab, Fab2, Fab2′, scFv, PEGylated Fab, PEGylated scFv, PEGylated Fab2, VH::CH1::HSA+LC, HSA::VH::CH1+LC, LC::HSA+VH::CH1, HSA::LC+VH::CH1, or other appropriate construct.

[0051] In one aspect, the disclosure features a protein (e.g., an isolated protein) that binds to MMP-9 (e.g., human MMP-9) and includes at least one immunoglobulin variable region. For example, the protein includes a heavy chain (HC) immunoglobulin variable domain sequence and a light chain (LC) immunoglobulin variable domain sequence. The protein is capable of binding to MMP-9 (e.g., human MMP-9). In one embodiment, the protein binds to and inhibits MMP-9 (e.g., inhibits MMP-9 catalytic activity), e.g., of human MMP-9.

[0052] In some embodiments, the protein binds to human MMP-9 specifically, and not to MMP-9 from another species (e.g., the protein does not bind to MMP-9 from another species with greater than background levels of binding).

[0053] In some embodiments, the protein binds to MMP-9 from human, mouse, rat and other species, but not to MMP-2 of any species (e.g., the protein does not bind to MMP-2 of any other species with greater than background levels of binding).

[0054] In some embodiments, the protein is capable of binding to human MMP-9 and also is capable of binding to MMP-9 of a rodent species selected from the group consisting of Mus musculus, Rattus norvegus, and Macaca fascicularis. In some embodiments, the Ki,app for the rodent species MMP9 is no more than 10-fold higher than the Ki,app for the human MMP9.

[0055] In some embodiments, the protein binds to human MMP-9 specifically, and not to MMP-9 from another species (e.g., the protein does not bind to MMP-9 from another species with greater than background levels of binding).

[0056] In some embodiments, the protein binds MMP-9 specifically, and not to another matrix metalloproteinase (e.g., the protein does not bind to any other matrix metalloproteinase with greater than background levels of binding).

[0057] Such binding proteins can be conjugated to a drug (e.g., to form an MMP-9 binding protein-drug conjugate) and used therapeutically. This disclosure relates, in part, to MMP-9 binding protein-drug conjugates, the preparation of these conjugates, and uses thereof. The conjugates can be used, e.g., in the treatment of disorders, e.g., for the treatment of cancer, inflammation, heart failure, septic shock, neuropathic pain, or macular degeneration. Targeting (e.g., an killing) of the MMP-9 expressing cells and/or tumors, e.g., with high affinity binding protein-drug conjugates can be a potent therapy in the treatment of diseases, e.g., cancer, inflammation, heart failure, septic shock, neuropathic pain, or macular degeneration.

[0058] The protein can include one or more of the following characteristics: (a) a human CDR or human framework region; (b) the HC immunoglobulin variable domain sequence comprises one or more (e.g., 1, 2, or 3) CDRs that are at least 85, 88, 90, 91, 92, 93, 94, 95, 96, 97, 98, 99, or 100% identical to a CDR of a HC variable domain described herein; (c) the LC immunoglobulin variable domain sequence comprises one or more (e.g., 1, 2, or 3) CDRs that are at least 85, 88, 90, 91, 92, 93, 94, 95, 96, 97, 98, 99, or 100% identical to a CDR of a LC variable domain described herein; (d) the LC immunoglobulin variable domain sequence is at least 85, 88, 90, 91, 92, 93, 94, 95, 96, 97, 98, 99, or 100% identical to a LC variable domain described herein; (e) the HC immunoglobulin variable domain sequence is at least 85, 88, 90, 91, 92, 93, 94, 95, 96, 97, 98, 99, or 100% identical to a HC variable domain described herein; (f) the protein binds an epitope bound by a protein described herein, or an epitope that overlaps with such epitope; and (g) a primate CDR or primate framework region.

[0059] The protein can bind to MMP-9, e.g., human MMP-9 with a binding affinity of at least 10⁵, 10⁶, 10⁷, 10⁸, 10⁹, 10¹⁰ and 10¹¹ M⁻¹. In one embodiment, the protein binds to MMP-9 with a K_{off} slower than 1×10⁻³, 5×10⁻⁴ s⁻¹, or 1×10⁻⁴ s⁻¹. In one embodiment, the protein binds to MMP-9 with a Kₒₙ faster than 1×10², 1×10³, or 5×10³ M⁻¹ s⁻¹. In one embodiment, the protein inhibits human MMP-9 activity, e.g., with a Ki of less than 10⁻⁵, 10⁻⁶, 10⁻⁷, 10⁻⁸, 5×10⁻⁹, 10⁻⁹, 5×10⁻¹⁰ and 10⁻¹⁰ M. The protein can have, for example, an IC50 of less than 100 nM, 10 nM or 1 nM. In some embodiments, the protein has an IC50 of about 1.8 nM. The affinity of the protein for MMP-9 can be characterized by a K_{D} of less than 100 nm, less than 10 nM, or about 3 nM (e.g., 3.1 nM), about 5 nM (e.g., 5 nM), about 6 nm (e.g., 5.9 nM), about 7 nM (e.g., 7.1 nM), or about 10 nM (e.g., 9.6 nM).

[0060] In some embodiments, the protein has a K_{D}<20 nM. In some embodiments, the protein has a K_{D} 0.2 nM for both human MMP-9 and human MMP-2.

[0061] In some embodiments, the protein has a t1/2 of at least about 10 minutes (e.g., 11 minutes), at least about 20 minutes (e.g., 18 minutes), at least about 25 minutes (e.g., 25 minutes), at least about 35 minutes (e.g., 33 minutes), or at least about 60 minutes (e.g., 57 minutes).

[0062] In one embodiment, the protein binds the catalytic domain of human MMP-9, e.g., the protein contacts residues in or near the active site of MMP-9.

[0063] In some embodiments, the protein does not contact residues in or near the active site of MMP-9 but instead binds elsewhere on MMP-9 and causes a steric change in MMP-9 that affects (e.g., inhibits) its activity.

[0064] In another preferred embodiment, the protein binds MMP-9 and the protein is a human antibody having the light and heavy chains of antibodies picked from the list comprising M0279-A03, M0279-B02, M0288-C08, and M0281-F06. In a preferred embodiment, the protein is a human antibody having its heavy chain picked from the list comprising M0279-A03, M0279-B02, M0288-C08, and M0281-F06. In a preferred embodiment, the protein is a human antibody having its light chain picked from the list comprising M0279-A03, M0279-B02, M0288-C08, and M0281-F06. In a preferred embodiment, the protein is a human antibody having one or more (e.g., 1, 2, or 3) heavy chain CDRs picked from the corresponding CDRs of the list of heavy chains comprising M0279-A03, M0279-B02, M0288-C08, and M0281-F06. In a preferred embodiment, the protein is a human antibody having one or more (e.g., 1, 2, or 3) light chain CDRs picked from the corresponding CDRs of the list of light chains comprising M0279-A03, M0279-B02, M0288-C08, and M0281-F06.

[0065] In one embodiment, the HC and LC variable domain sequences are components of the same polypeptide chain. In another, the HC and LC variable domain sequences are components of different polypeptide chains. For example, the protein is an IgG, e.g., IgG1, IgG2, IgG3, or IgG4. The protein can be a soluble Fab (sFab). In other implementations the protein includes a Fab2′, scFv, minibody, scFv::Fc fusion, Fab::HSA fusion, HSA::Fab fusion, Fab::HSA::Fab fusion, or other molecule that comprises the antigen combining site of one of the binding proteins herein. The VH and VL regions of these Fabs can be provided as IgG, Fab, Fab2, Fab2′, scFv, PEGylated Fab, PEGylated scFv, PEGylated Fab2, VH::CH1::HSA+LC, HSA::VH::CH1+LC, LC::HSA+VH::CH1, HSA::LC+VH::CH1, or other appropriate construction.

[0066] In one embodiment, the protein is a human or humanized antibody or is non-immunogenic in a human. For example, the protein includes one or more human antibody framework regions, e.g., all human framework regions. In one embodiment, the protein includes a human Fc domain, or an Fc domain that is at least 95, 96, 97, 98, or 99% identical to a human Fc domain.

[0067] In one embodiment, the protein is a primate or primatized antibody or is non-immunogenic in a human. For example, the protein includes one or more primate antibody framework regions, e.g., all primate framework regions. In one embodiment, the protein includes a primate Fc domain, or an Fc domain that is at least 95, 96, 97, 98, or 99% identical to a primate Fc domain. “Primate” includes humans (Homo sapiens), chimpanzees (Pan troglodytes and Pan paniscus (bonobos)), gorillas (Gorilla gorilla), gibons, monkeys, lemurs, aye-ayes (Daubentonia madagascariensis), and tarsiers.

[0068] In certain embodiments, the protein includes no sequences from mice or rabbits (e.g., is not a murine or rabbit antibody).

[0069] In one embodiment, the protein is capable of binding to tumor cells expressing MMP-9, e.g., to Colo205 (a human colorectal carcinoma cell line), or MCF-7 (a human breast adenocarcinoma cell line) cells.

[0070] In one embodiment, protein is physically associated with a nanoparticle, and can be used to guide a nanoparticle to a cell expressing MMP-9 on the cell surface. In one embodiment, the protein causes effector cells (CDC or ADCC) to kill a cell which expresses MMP-9.

[0071] In some aspects, the antibody disclosed herein inhibits human MMP-9 (hMMP-9) and mouse MMP-9 (mMMP-9). In some embodiments, inhibition of MMP-9 from other species (e.g., rat and cynomolgus monkeys) is also seen. Having activity toward human and mouse enzymes relates to the need to test the active pharmaceutical ingredient in mice before treating human subjects. Thus, in some preferred embodiments of the invention, the binding protein (e.g., antibody) has an apparent Kᵢ for hMMP-9 less than 20 nM, 15 nM, 10 nM, 5 nM, 1 nM and an apparent Kᵢ for mMMP-9 less than 20 nM, 15 nM, 10 nM, 5 nM or 1 nM.

[0072] In some embodiment, these measurements are for Fabs. Converting a Fab into an IgG can lower the apparent Kᵢ (i.e., increase the degree of inhibition). The affinity for human MMP-9 are more important than are those for the mouse since the stronger the affinity, the more effective is the drug at any given dose level. Hence, a Fab that has an apparent Kᵢ for hMMP-9 less than 1 nM and an apparent Kᵢ for mMMP-9 less than 5 nM is an acceptable embodiment. A Fab that has an apparent Kᵢ for hMMP-9 less than 0.1 nM and an apparent Kᵢ for mMMP-9 less than 1 nM is a preferred embodiment. Additionally, a Fab that has an apparent Kᵢ for hMMP-9 less than 0.1 nM and an apparent Kᵢ for mMMP-9 less than 5 nM.

[0073] In some aspects, the disclosure features an antibody (e.g., human antibody) that binds and inhibits (e.g., inhibits the catalytic activity of) hMMP9 with an apparent Ki (Ki app) of <1 nM and mMMP9 with Ki app of <1 nM. In some embodiments, the antibody binds and inhibits hMMP9 with Ki app of <1 nM and mMMP9 with Ki app of <1 nM.

[0074] In some aspects, the disclosure features an antibody (e.g., human antibody) that binds and inhibits hMMP9 with Ki app of <0.1 nM and mMMP9 with Ki app of <1 nM. In some embodiments, the antibody binds and inhibits hMMP9 with Ki app of <0.1 nM and mMMP9 with Ki app of <1 nM.

[0075] In some aspects, the disclosure features an antibody (e.g., human antibody) that binds and inhibits hMMP9 with Ki app of <1 nM and mMMP9 with Ki app of <5 nM. In some embodiments, the antibody binds and/or inhibits hMMP9 with Ki app of <1 nM and mMMP9 with Ki app of <5 nM.

[0076] In some aspects, the disclosure features an isolated protein that is a human antibody or a humanized antibody that is capable of binding human MMP9 with Ki,app <1 nM or mouse MMP9 with Ki,app <about 5 nM.

[0077] In some aspects, the disclosure features an isolated protein that is a human antibody or a humanized antibody that is capable of binding human MMP9 with Ki,app <1 nM.

[0078] In some aspects, the disclosure features an antibody (e.g., human antibody) that binds and inhibits hMMP9 with Ki app <0.1 nM and mMMP9 with Ki app <5 nM. In some embodiments, the antibody binds and inhibits hMMP9 with Ki app <0.1 nM and mMMP9 with Ki app <5 nM.

[0079] In some aspects, the antibody disclosed herein inhibits human MMP-9 (hMMP-9) but does not inhibit mouse MMP-9 (mMMP-9)(e.g., the antibody inhibits mMMP-9 less effectively (e.g., 5-, 10-, 50-, 100-, or 1000-fold less or not at all, e.g., as compared to a negative control) than it inhibits hMMP-9. In some embodiments, the antibody disclosed herein inhibits human MMP-9 (hMMP-9) with a Ki of thess than 20 nM, 15 nM, 10 nM, 5 nM, 1 nM, 0.5 nM, 0.1 nM and inhibits human MMP-2 (hMMP-2) with a Ki of thess than 20 nM, 15 nM, 10 nM, 5 nM, 1 nM, 0.5 nM, 0.1 nM, but does not inhibit mouse MMP-9 (mMMP-9).

[0080] In some aspects, the disclosure features an antibody (e.g., human antibody) that binds and inhibits (e.g., inhibits the catalytic activity of) hMMP9 with an apparent Ki (Ki app) of <1 nM but does not inhibit mMMP9.

[0081] In some aspects, the disclosure features an antibody (e.g., human antibody) that binds and inhibits hMMP9 with Ki app of <0.1 nM but does not inhibit mMMP9.

[0082] In some aspects, the disclosure features an antibody (e.g., human antibody) that binds and inhibits hMMP9 with Ki app of <1 nM but does not inhibit mMMP9.

[0083] In some aspects, the disclosure features an antibody (e.g., human antibody) that binds and inhibits hMMP9 with Ki app <0.1 nM.

[0084] In another aspect, the disclosure features an MMP-9 binding protein that is a competitive inhibitor of MMP-9. In some embodiments, the binding protein competes with an MMP-9 substrate (e.g., collagen, e.g., binds to the same epitope as the substrate, e.g., and prevents substrate binding.

[0085] In some aspects, the disclosure features a method of inhibiting an interaction between MMP-9 and a substrate (e.g., collagen). The method includes contacting an a binding protein described herein with MMP-9 (e.g., in vitro or in vivo), wherein the binding protein binds to MMP-9 and thereby prevents the binding of a substrate to MMP-9. In some embodiments, the binding protein binds to the same epitope on MMP-9 as the substrate, e.g., the binding protein is a competitive inhibitor. In some embodiments, the binding protein does not bind the same epitope as the substrate but causes a steric change in MMP-9 that decreases or inhibits the ability of the substrate to bind.

[0086] In one aspect, the disclosure features an MMP-9 binding protein-drug conjugate that includes an MMP-9 binding protein, e.g., an MMP-9 binding protein described herein, and a drug.

[0087] In one embodiment, the binding protein comprises at least one immunoglobulin variable region, and/or the protein binds to and/or inhibits MMP-9, e.g., inhibits MMP-9 catalytic activity.

[0088] In one embodiment, the drug is a cytotoxic or cytostatic agent. The cytotoxic agent can be, e.g., selected from the group consisting of an auristatin, a DNA minor groove binding agent, a DNA minor groove alkylating agent, an enediyne, a lexitropsin, a duocarmycin, a taxane, a puromycin, a dolastatin, a podophyllotoxin, a baccatin derivative, a cryptophysin, a combretastatin, a maytansinoid, and a vinca alkaloid. In one embodiment, the cytotoxic agent is an auristatin and, e.g., the auristatin is selected from AFP, MMAF, MMAE, AEB, AEVB and auristatin E. In one embodiment, the auristatin is AFP or MMAF. In another embodiment, the cytotoxic agent is a maytansinoid and, e.g., the maytansinoid is selected from a maytansinol, maytansine, DM1, DM2, DM3 and DM4. In one embodiment, the maytansinoid is DM1. In another embodiment, the cytotoxic agent is selected from paclitaxel, docetaxel, CC-1065, SN-38, topotecan, morpholino-doxorubicin, rhizoxin, cyanomorpholino-doxorubicin, dolastatin-10, echinomycin, combretatstatin, calicheamicin, and netropsin. In one embodiment, the cytotoxin is an auristatin, a maytansinoid, or calicheamicin.

[0089] In one embodiment, the cytotoxic agent is an antitubulin agent and, e.g., the antitubulin agent is selected from AFP, MMAP, MMAE, AEB, AEVB, auristatin E, vincristine, vinblastine, vindesine, vinorelbine, VP-16, camptothecin, paclitaxel, docetaxel, epothilone A, epothilone B, nocodazole, colchicines, colcimid, estramustine, cemadotin, discodermolide, maytansinol, maytansine, DM1, DM2, DM3, DM4 and eleutherobin.

[0090] In one embodiment, the MMP-9 binding protein (e.g., antibody) is conjugated to the drug (e.g., cytotoxic agent) via a linker. In one embodiment, the linker is cleavable under intracellular conditions, e.g., the cleavable linker is a peptide linker cleavable by an intracellular protease. In one embodiment, the linker is a peptide linker, e.g., a dipeptide linker, e.g., a val-cit linker or a phe-lys linker. In one embodiment, the cleavable linker is hydrolyzable at a pH of less than 5.5, e.g., the hydrolyzable linker is a hydrazone linker. In another embodiment, the cleavable linker is a disulfide linker.

[0091] A binding protein described herein can be provided as a pharmaceutical composition, e.g., including a pharmaceutically acceptable carrier. The composition can be at least 10, 20, 30, 50, 75, 85, 90, 95, 98, 99, or 99.9% free of other protein species. In some embodiments, the binding protein can be produced under GMP (good manufacturing practices). In some embodiments, the binding protein is provided in pharmaceutically acceptable carriers, e.g., suitable buffers or excipients.

[0092] The dose of a binding protein (e.g., a pharmaceutical composition containing a binding protein described herein) is sufficient to block about 20%, about 30%, about 40%, about 50%, about 60%, about 70%, about 80%, about 85%, about 90%, about 95%, about 99%, or about 100% of the activity of MMP-9 in the patient, e.g., at the site of disease. Depending on the disease, this may require a dose, e.g., of between about 0.01 mg/Kg to about 100 mg/Kg, e.g., between about 0.1 and about 10 mg/Kg. For example, the dose can be a dose of about 0.1, about 1, about 3, about 6, or about 10 mg/Kg. For example, for an IgG having a molecular mass of 150,000 g/mole (2 binding sites), these doses correspond to approximately 18 nM, 180 nM, 540 nM, 1.08 microM, and 1.8 microM, respectively, of binding sites for a 5 L blood volume. Medicine being partly an art, the optimal dose will be established by clinical trials, but will most likely lie in this range.

[0093] In another aspect, the disclosure features a method of detecting an MMP-9 and/or MMP-2 in a sample, e.g., a sample from a patient (e.g., tissue biopsy or blood sample). The method includes: contacting the sample with an MMP-9/MMP-2 binding protein, e.g., an MMP-9/MMP-2 binding protein described herein, or an MMP-9 binding protein, e.g., an MMP-9 binding protein described herein; and detecting an interaction between the protein and the MMP-9 or MMP-2, if present. In some embodiments, the protein includes a detectable label. An MMP-9/MMP-2 binding protein can be used to detect MMP-9 and/or MMP-2 in a subject. An MMP-9 binding protein can be used to detect MMP-9 in a subject. The method includes: administering an MMP-9/MMP-2 binding protein or MMP-9 binding protein to a subject; and detecting the protein in the subject. In some embodiments, the protein further includes a detectable label. For example, the detecting comprises imaging the subject. For example, MMP-9 and MMP-2 activity can be a marker of joint pathogenesis and/or disease progression in subjects with, or suspected of having, arthritis.

[0094] In another aspect, the disclosure features a method of modulating MMP-9 and/or MMP-2 activity. The method includes: contacting MMP-9 and/or MMP-2 with an MMP-9/MMP-2 binding protein (e.g., in a human subject), e.g., an MMP-9/MMP-2 binding protein described herein, thereby modulating MMP-9 and/or MMP-2 activity. In some embodiments, the binding protein inhibits MMP-9 activity (e.g., inhibits MMP-9 catalytic activity) and/or inhibits MMP-2 activity (e.g., inhibits MMP-2 catalytic activity).

[0095] In another aspect, the disclosure features a method of modulating MMP-9 activity. The method includes: contacting MMP-9 with an MMP-9 binding protein (e.g., in a human subject), e.g., an MMP-9 binding protein described herein, thereby modulating MMP-9 activity. In some embodiments, the binding protein inhibits MMP-9 activity (e.g., inhibits MMP-9 catalytic activity).

[0096] In another aspect, the disclosure features a method of treating cancer (e.g., metastatic cancer) (e.g., in a subject that has cancer or is suspected of having cancer). The method includes: administering, to a subject, an MMP-9/MMP-2 binding protein or MMP-9 binding protein, e.g., an MMP-9/MMP-2 binding protein or MMP-9 binding protein described herein, in an amount sufficient to treat a cancer in the subject. For example, the cancer is head and neck cancer, oral cavity cancer, laryngeal cancer, chondrosarcoma, breast cancer (which may be estrogen receptor positive (ER+), estrogen receptor negative (ER−), Her2 positive (Her2+), Her2 negative (Her2−), or a combination thereof, e.g., ER+/Her2+, ER+/Her2−, ER−/Her2+, or ER−/Her2−), laryngeal cancer, bladder cancer, ovarian cancer, testicular carcinoma, melanoma, or a brain tumor (e.g., astrocytomas, glioblastomas, gliomas).

[0097] MMP-9/MMP-2 binding proteins and MMP-9 binding proteins can be useful for modulating metastatic activity in a subject (e.g., in a subject that has a metastatic cancer or is suspected of having a metastatic cancer). The protein can be administered, to the subject, in an amount effective to modulate metastatic activity. For example, the protein inhibits one or more of: tumor growth, tumor embolism, tumor mobility, tumor invasiveness, and cancer cell proliferation.

[0098] The methods disclosed herein relating to the treatment cancer (e.g., treating cancer and/or modulation of metastatic activity) can further include providing (e.g., administering) to the subject a second therapy that is an anti-cancer therapy, e.g., administration of a chemotherapeutic, e.g., an agent that antagonizes signaling through a VEGF pathway, e.g., bevacizumab (AVASTIN®). In one embodiment, the second therapy includes administering 5-FU, leucovorin, and/or irinotecan. In one embodiment, the second therapy includes administering a Tie1 inhibitor (e.g., an anti-Tie1 antibody). As another example, the second agent can be an anti-MMP14 binding protein (e.g., IgG or Fab, e.g., DX-2400, or a protein described in U.S. Pub. App. No. 2007-0217997). In one embodiment, the second therapy is an inhibitor of plasmin (e.g., a kunitz domain disclosed in U.S. Pat. No. 6,010,880, such as a protein or polypeptide comprising the amino acid sequence

(SEQ ID NO: 1)

MHSFCAFKAETGPCRARFDRWFFNIFTRQCEEFIYGGCEGNQNRFESL
EECKKMCTRD.

[0099] In another aspect, the disclosure features a method of treating heart failure (e.g., in a subject that has heart failure or is suspected of having heart failure). The method includes: administering, to a subject, an MMP-9/MMP-2 binding protein or MMP-9 binding protein, e.g., an MMP-9/MMP-2 or MMP-9 binding protein described herein in an amount sufficient to treat heart failure in the subject. The method can further include providing to the subject a second therapy that is a heart failure therapy.

[0100] In another aspect, the disclosure features a method of treating septic shock (e.g., in a subject that has septic shock or is suspected of having septic shock). The method includes: administering, to a subject, an MMP-9/MMP-2 or MMP-9 binding protein, e.g., an MMP-9/MMP-2 or MMP-9 binding protein described herein in an amount sufficient to treat septic shock in the subject. The method can further include providing to the subject a second therapy that is a therapy for septic shock.

[0101] In another aspect, the disclosure features a method of treating neuropathic pain (e.g., in a subject that has neuropathic pain or is suspected of having neuropathic pain). The method includes: administering, to a subject, an MMP-9/MMP-2 binding protein or MMP-9 binding protein, e.g., an MMP-9/MMP-2 binding protein or MMP-9 binding protein described herein, in an amount sufficient to treat neuropathic pain in the subject. The method can further include providing to the subject a second therapy that is a therapy for neuropathic pain.

[0102] In another aspect, the disclosure features a method of treating an ocular condition (e.g., macular degeneration) (e.g., in a subject that has an ocular condition or is suspected of having an ocular condition). The method includes: administering, to a subject, an MMP-9/MMP-2 binding protein or MMP-9 binding protein, e.g., an MMP-9/MMP-2 binding protein or MMP-9 binding protein described herein, in an amount sufficient to treat the ocular condition in the subject. In one embodiment, the method further includes administering a second agent an agent that antagonizes signaling through a VEGF pathway, e.g., bevacizumab or ranibizumab. In one embodiment where the second agent is a VEGF pathway inhibitor (e.g., bevacizumab or ranibizumab), the ocular condition is macular degeneration, e.g., age-related macular degeneration, such as wet age-related macular degeneration.

[0103] In another aspect, the disclosure features a method of treating an autoimmune disorder (e.g., autoimmune blistering disorders of the skin). The method includes: administering, to a subject, an MMP-9/MMP-2 binding protein or MMP-9 binding protein, e.g., an MMP-9/MMP-2 binding protein or MMP-9 binding protein described herein, in an amount sufficient to treat the disorder in the subject. In one embodiment, the method further includes administering a second agent.

[0104] In another aspect, the disclosure features a method of treating an inflammatory disease (e.g., chronic obstructive pulmonary disease (COPD), asthma, rhinitis, inflammatory bowel disease, synovitis, rheumatoid arthritis) (e.g., in a subject that has an inflammatory disease or is suspected of having an inflammatory disease). The method includes: administering, to a subject, an MMP-9/MMP-2 binding protein or MMP-9 binding protein, e.g., an MMP-9/MMP-2 binding protein or MMP-9 binding protein described herein, in an amount sufficient to treat the inflammatory disease in the subject. The method can further include providing to the subject a second therapy that is an anti-inflammatory therapy. For example, particularly for rheumatoid arthritis, the second therapy comprises administering one or more of the following agents: aspirin, naproxen, ibuprofen, etodolac, cortisone (corticosteroids), antacids, sucralfate, proton-pump inhibitors, misoprostol, gold (e.g., gold salts, gold thioglucose, gold thiomalate, oral gold), methotrexate, sulfasalazine, D-penicillamine, azathioprine, cyclophosphamide, chlorambucil, cyclosporine, leflunomide, etanercept, infliximab, anakinra, adalimumab, and/or hydroxychloroquine.

[0105] Other exemplary therapeutic methods that include administering an MMP-9/MMP-2 binding protein or MMP-9 binding protein are described below. An MMP-9/MMP-2 binding protein or MMP-9 binding protein described herein can be administered in combination with one or more other MMP inhibitors, e.g., small molecule inhibitors, e.g., broad specificity inhibitors. In one embodiment, the small molecule inhibitors are one or more of neovastat, marimastat, BAY 12-9566, or prinomastat. In another embodiment, the one or more MMP inhibitors include another MMP-9 binding protein and/or another MMP-2 binding protein.

[0106] MMP-9/MMP-2 binding proteins and MMP-9 binding proteins are useful for targeted delivery of an agent to a subject (e.g., a subject who has or is suspected of having a tumor), e.g., to direct the agent to a tumor in the subject. For example, an MMP-9/MMP-2 binding protein or MMP-9 binding protein that is coupled to an anti-tumor agent (such as a chemotherapeutic, toxin, drug, or a radionuclide (e.g., ¹³¹I, ⁹⁰Y, ¹⁷⁷Lu)) can be administered to a subject who has or is suspected of having a tumor.

[0107] In another aspect, the disclosure features a method of imaging a subject. The method includes administering an MMP-9/MMP-2 binding protein or MMP-9 binding protein, e.g., an MMP-9/MMP-2 binding protein or MMP-9 binding protein described herein, to the subject. In some embodiments, the protein is one that does not substantially inhibit MMP-9 and/or MMP-2 catalytic activity. The MMP-9/MMP-2 binding protein or MMP-9 binding protein may include a detectable label (e.g., a radionuclide or an MRI-detectable label). In one embodiment, the subject has or is suspected of having a tumor. The method is useful for cancer diagnosis, intraoperative tumor detection, post-operative tumor detection, or monitoring tumor invasive activity.

[0108] In one aspect, the disclosure features the use of an MMP-9/MMP-2 binding protein or MMP-9 binding protein described herein for the manufacture of a medicament for the treatment of a disorder described herein, e.g., cancer, inflammation, heart failure, septic shock, neuropathic pain, or macular degeneration.

[0109] The details of one or more embodiments of the invention are set forth in the accompanying drawings and the description below. Other features, objects, and advantages of the invention will be apparent from the description and drawings, and from the claims.

[0110] The contents of all cited references including literature references, issued patents, published or non-published patent applications cited throughout this application as well as those listed below are hereby expressly incorporated by reference in their entireties. In case of conflict, the present application, including any definitions herein, will control.

### DESCRIPTION OF DRAWINGS

[0111] FIGS. 1A and 1B are two line graphs showing IC₅₀ (nM) versus substrate concentration (μM) of an MMP-9 binding protein (539A-M0237-D02). In FIG. 1A, the substrate is human MMP-9. In FIG. 1B, the substrate is mouse MMP-9.

[0112] FIG. 2 is a bar graph showing the effect of an MMP-9/MMP-2 binding protein (539A-M0237-D02) on inflammatory cell infiltration into a carrageenan-stimulated mouse air pouch.

[0113] FIG. 3 is a graph showing the effect of an MMP-9/MMP-2 binding protein (539A-M0237-D02) on arthritic index.

[0114] FIG. 4 is a line graph showing activity of MMP-9 binding proteins in a Colo205 colon xenograft cancer model.

[0115] FIG. 5 is a line graph showing the efficacy of MMP-9 binding proteins in a BxPC-3 pancreatic cancer model.

[0116] FIG. 6 is a bar graph showing inhibitory activity (%) of 19 unique Fabs selected from affinity maturation (LC+HCDR1-2-prescreening) 539A-M0256-G09, 539A-M0256-A04, 539A-M0256-D03, 539A-M0265-A07, 39A-M0263-F01, 539A-M0263-F05, 539A-M0256-C09, 539A-M0256-B03, 539A-M0265-A04, 539A-M0256-A07, 539A-M0264-A09, 539A-M0265-C07, 539A-M0256-D11, 539A-M0266-E02, 539A-M0256-E10, 539A-M0256-C07, 539A-M0266-D03, 539A-M0256-E03, 539A-M0237-D02 Fabs and 539A-M0237-D02 IgG1 against hMMP-9, hMMP-2, mMMP-9 and mMMP-2.

[0117] FIG. 7 is a table showing Kiapp ([25 μM] (nM) of 539A-M0266-E02 against human MMP-9, human MMP-2, mouse MMP-9 and mouse MMP-2.

[0118] FIG. 8 is a table showing cross-reactivity data for 539A-M0266-E02 against human MMP-1, -7, -8, 10 and -12.

### DETAILED DESCRIPTION

[0119] Matrix metalloproteinase-2 (MMP-2) and matrix metalloproteinase-9 (MMP-9) are 72- and 92-kD, respectively, type IV collagenases that are members of a group of secreted zinc metalloproteases which, in mammals, degrade the collagens, fibronectin and elastin of the extracellular matrix. Other members of this group include interstitial collagenase (MMP-1) and stromelysin (MMP-3). MMP-2, the 72-kD type IV collagenase (also known as CLG4A), is secreted from normal skin fibroblasts, whereas MMP-9, the 92-kD collagenase (also known as CLG4B), is produced by normal alveolar macrophages and granulocytes. The present disclosure provides proteins that bind to MMP-9 and MMP-2 and, in some instances, inhibit MMP-9 and MMP-2 activity. The present disclosure also provides proteins that bind MMP-9 and, in some instances, inhibit MMP-9 activity.

[0120] The term “binding protein” refers to a protein that can interact with a target molecule. This term is used interchangeably with “ligand.” An “MMP-9/MMP-2 binding protein” refers to a protein that can interact with MMP-9 and MMP-2, and includes, in particular, proteins that preferentially interact with and/or inhibit MMP-9 and MMP-2. For example, the MMP-9/MMP-2 binding protein is an antibody. An “MMP-9 binding protein” refers to a protein that can interact with MMP-9, and includes, in particular, proteins that preferentially interact with and/or inhibit MMP-9. For example, the MMP-9 binding protein is an antibody.

[0121] The term “antibody” refers to a protein that includes at least one immunoglobulin variable domain or immunoglobulin variable domain sequence. For example, an antibody can include a heavy (H) chain variable region (abbreviated herein as VH), and a light (L) chain variable region (abbreviated herein as VL). In another example, an antibody includes two heavy (H) chain variable regions and two light (L) chain variable regions. The term “antibody” encompasses antigen-binding fragments of antibodies (e.g., single chain antibodies, Fab and sFab fragments, F(ab′)₂, Fd fragments, Fv fragments, scFv, and domain antibodies (dAb) fragments (de Wildt et al., Eur J. Immunol. 1996; 26(3):629-39.)) as well as complete antibodies. An antibody can have the structural features of IgA, IgG, IgE, IgD, IgM (as well as subtypes thereof). Antibodies may be from any source, but primate (human and non-human primate) and primatized are preferred

[0122] The VH and VL regions can be further subdivided into regions of hypervariability, termed “complementarity determining regions” (“CDR”), interspersed with regions that are more conserved, termed “framework regions” (“FR”). The extent of the framework region and CDRs has been precisely defined (see, Kabat, E. A., et al. (1991) Sequences of Proteins of Immunological Interest, Fifth Edition, U.S. Department of Health and Human Services, NIH Publication No. 91-3242, and Chothia, C. et al. (1987) J. Mol. Biol. 196:901-917, see also www.hgmp.mrc.ac.uk). Kabat definitions are used herein. Each VH and VL is typically composed of three CDRs and four FRs, arranged from amino-terminus to carboxy-terminus in the following order: FR1, CDR1, FR2, CDR2, FR3, CDR3, FR4.

[0123] As used herein, an “immunoglobulin variable domain sequence” refers to an amino acid sequence which can form the structure of an immunoglobulin variable domain such that one or more CDR regions are positioned in a conformation suitable for an antigen binding site. For example, the sequence may include all or part of the amino acid sequence of a naturally-occurring variable domain. For example, the sequence may omit one, two or more N- or C-terminal amino acids, internal amino acids, may include one or more insertions or additional terminal amino acids, or may include other alterations. In one embodiment, a polypeptide that includes immunoglobulin variable domain sequence can associate with another immunoglobulin variable domain sequence to form an antigen binding site, e.g., a structure that preferentially interacts with an MMP-9 protein, e.g., the MMP-9 catalytic domain and/or a structure that preferentially interacts with an MMP-2 protein, e.g., the MMP-2 catalytic domain.

[0124] The VH or VL chain of the antibody can further include all or part of a heavy or light chain constant region, to thereby form a heavy or light immunoglobulin chain, respectively. In one embodiment, the antibody is a tetramer of two heavy immunoglobulin chains and two light immunoglobulin chains, wherein the heavy and light immunoglobulin chains are inter-connected by, e.g., disulfide bonds. In IgGs, the heavy chain constant region includes three immunoglobulin domains, CH1, CH2 and CH3. The light chain constant region includes a CL domain. The variable region of the heavy and light chains contains a binding domain that interacts with an antigen. The constant regions of the antibodies typically mediate the binding of the antibody to host tissues or factors, including various cells of the immune system (e.g., effector cells) and the first component (C1q) of the classical complement system. The light chains of the immunoglobulin may be of types kappa or lambda. In one embodiment, the antibody is glycosylated. An antibody can be functional for antibody-dependent cytotoxicity and/or complement-mediated cytotoxicity.

[0125] One or more regions of an antibody can be human or effectively human. For example, one or more of the variable regions can be human or effectively human. For example, one or more of the CDRs can be human, e.g., HC CDR1, HC CDR2, HC CDR3, LC CDR1, LC CDR2, and LC CDR3. Each of the light chain CDRs can be human. HC CDR3 can be human. One or more of the framework regions can be human, e.g., FR1, FR2, FR3, and FR4 of the HC or LC. For example, the Fc region can be human. In one embodiment, all the framework regions are human, e.g., derived from a human somatic cell, e.g., a hematopoietic cell that produces immunoglobulins or a non-hematopoietic cell. In one embodiment, the human sequences are germline sequences, e.g., encoded by a germline nucleic acid. In one embodiment, the framework (FR) residues of a selected Fab can be converted to the amino-acid type of the corresponding residue in the most similar primate germline gene, especially the human germline gene. One or more of the constant regions can be human or effectively human. For example, at least 70, 75, 80, 85, 90, 91, 92, 93, 94, 95, 96, 97, 98, 99, or 100% of an immunoglobulin variable domain, the constant region, the constant domains (CH1, CH2, CH3, CL1), or the entire antibody can be human or effectively human.

[0126] All or part of an antibody can be encoded by an immunoglobulin gene or a segment thereof. Exemplary human immunoglobulin genes include the kappa, lambda, alpha (IgA1 and IgA2), gamma (IgG1, IgG2, IgG3, IgG4), delta, epsilon and mu constant region genes, as well as the many immunoglobulin variable region genes. Full-length immunoglobulin “light chains” (about 25 KDa or about 214 amino acids) are encoded by a variable region gene at the NH2-terminus (about 110 amino acids) and a kappa or lambda constant region gene at the COOH— terminus. Full-length immunoglobulin “heavy chains” (about 50 KDa or about 446 amino acids), are similarly encoded by a variable region gene (about 116 amino acids) and one of the other aforementioned constant region genes, e.g., gamma (encoding about 330 amino acids). The length of human HC varies considerably because HC CDR3 varies from about 3 amino-acid residues to over 35 amino-acid residues.

[0127] The term “antigen-binding fragment” of a full length antibody refers to one or more fragments of a full-length antibody that retain the ability to specifically bind to a target of interest. Examples of binding fragments encompassed within the term “antigen-binding fragment” of a full length antibody include (i) a Fab fragment, a monovalent fragment consisting of the VL, VH, CL and CH1 domains; (ii) a F(ab′)₂ fragment, a bivalent fragment including two Fab fragments linked by a disulfide bridge at the hinge region; (iii) a Fd fragment consisting of the VH and CH1 domains; (iv) a Fv fragment consisting of the VL and VH domains of a single arm of an antibody, (v) a dAb fragment (Ward et al., (1989) Nature 341:544-546), which consists of a VH domain; and (vi) an isolated complementarity determining region (CDR) that retains functionality. Furthermore, although the two domains of the Fv fragment, VL and VH, are coded for by separate genes, they can be joined, using recombinant methods, by a synthetic linker that enables them to be made as a single protein chain in which the VL and VH regions pair to form monovalent molecules known as single chain Fv (scFv). See e.g., U.S. Pat. Nos. 5,260,203, 4,946,778, and 4,881,175; Bird et al. (1988) Science 242:423-426; and Huston et al. (1988) Proc. Natl. Acad. Sci. USA 85:5879-5883.

[0128] Antibody fragments can be obtained using any appropriate technique including conventional techniques known to those with skill in the art. The term “monospecific antibody” refers to an antibody that displays a single binding specificity and affinity for a particular target, e.g., epitope. This term includes a “monoclonal antibody” or “monoclonal antibody composition,” which as used herein refer to a preparation of antibodies or fragments thereof of single molecular composition, irrespective of how the antibody was generated.

[0129] An “effectively human” immunoglobulin variable region is an immunoglobulin variable region that includes a sufficient number of human framework amino acid positions such that the immunoglobulin variable region does not elicit an immunogenic response in a normal human. An “effectively human” antibody is an antibody that includes a sufficient number of human amino acid positions such that the antibody does not elicit an immunogenic response in a normal human.

[0130] A “humanized” immunoglobulin variable region is an immunoglobulin variable region that is modified to include a sufficient number of human framework amino acid positions such that the immunoglobulin variable region does not elicit an immunogenic response in a normal human. Descriptions of “humanized” immunoglobulins include, for example, U.S. Pat. No. 6,407,213 and U.S. Pat. No. 5,693,762.

[0131] As used herein, “binding affinity” refers to the apparent association constant or Kₐ. The Kₐ is the reciprocal of the dissociation constant (K_{d}). A binding protein may, for example, have a binding affinity of at least 10⁵, 10⁶, 10⁷, 10⁸, 10⁹, 10¹⁰ and 10¹¹ M⁻¹ for a particular target molecule, e.g., MMP-9 and/or MMP-2. Higher affinity binding of a binding protein to a first target relative to a second target can be indicated by a higher Kₐ (or a smaller numerical value K_{d}) for binding the first target than the Kₐ (or numerical value K_{d}) for binding the second target. In such cases, the binding protein has specificity for the first target (e.g., a protein in a first conformation or mimic thereof) relative to the second target (e.g., the same protein in a second conformation or mimic thereof; or a second protein). Differences in binding affinity (e.g., for specificity or other comparisons) can be at least 1.5, 2, 3, 4, 5, 10, 15, 20, 37.5, 50, 70, 80, 91, 100, 500, 1000, or 10⁵ fold.

[0132] Binding affinity can be determined by a variety of methods including equilibrium dialysis, equilibrium binding, gel filtration, ELISA, surface plasmon resonance, or spectroscopy (e.g., using a fluorescence assay). Exemplary conditions for evaluating binding affinity are in TRIS-buffer (50 mM TRIS, 150 mM NaCl, 5 mM CaCl₂ at pH7.5). These techniques can be used to measure the concentration of bound and free binding protein as a function of binding protein (or target) concentration. The concentration of bound binding protein ([Bound]) is related to the concentration of free binding protein ([Free]) and the concentration of binding sites for the binding protein on the target where (N) is the number of binding sites per target molecule by the following equation:

[Bound]=N·[Free]/((1/Ka)+[Free]).

[0133] It is not always necessary to make an exact determination of Kₐ, though, since sometimes it is sufficient to obtain a quantitative measurement of affinity, e.g., determined using a method such as ELISA or FACS analysis, is proportional to Kₐ, and thus can be used for comparisons, such as determining whether a higher affinity is, e.g., 2-fold higher, to obtain a qualitative measurement of affinity, or to obtain an inference of affinity, e.g., by activity in a functional assay, e.g., an in vitro or in vivo assay.

[0134] The inhibition constant (Ki) provides a measure of inhibitor potency; it is the concentration of inhibitor required to reduce enzyme activity by half and is not dependent on enzyme or substrate concentrations. The apparent Ki (Ki app) is obtained at different substrate concentrations by measuring the inhibitory effect of different concentrations of inhibitor (e.g., inhibitory binding protein) on the extent of the reaction (e.g., enzyme activity); fitting the change in pseudo-first order rate constant as a function of inhibitor concentration to the Morrison equation (Equation 1) yields an estimate of the apparent Ki value. The Ki is obtained from the y-intercept extracted from a linear regression analysis of a plot of Ki,app versus substrate concentration.

$$v = {v}_{o} - {v}_{o} ( \frac{( {K}_{i , app} + I + E ) - \sqrt{{( {K}_{i , app} + I + E )}^{2} - 4 \cdot I \cdot E}}{2 \cdot E} ) \qquad Equation 1$$

[0135] Where v=measured velocity; v₀=velocity in the absence of inhibitor; K_{i,app}=apparent inhibition constant; I=total inhibitor concentration; and E=total enzyme concentration.

[0136] An “isolated composition” refers to a composition (e.g., protein) that is removed from at least 90% of at least one component of a natural sample from which the isolated composition can be obtained. Compositions produced artificially or naturally can be “compositions of at least” a certain degree of purity if the species or population of species of interests is at least 5, 10, 25, 50, 75, 80, 90, 92, 95, 98, or 99% pure on a weight-weight basis.

[0137] An “epitope” refers to the site on a target compound that is bound by a binding protein (e.g., an antibody such as a Fab or full length antibody). In the case where the target compound is a protein, the site can be entirely composed of amino acid components, entirely composed of chemical modifications of amino acids of the protein (e.g., glycosyl moieties), or composed of combinations thereof. Overlapping epitopes include at least one common amino acid residue, glycosyl group, phosphate group, sulfate group, or other molecular feature.

[0138] Calculations of “homology” or “sequence identity” between two sequences (the terms are used interchangeably herein) are performed as follows. The sequences are aligned for optimal comparison purposes (e.g., gaps can be introduced in one or both of a first and a second amino acid or nucleic acid sequence for optimal alignment and non-homologous sequences can be disregarded for comparison purposes). The optimal alignment is determined as the best score using the GAP program in the GCG software package with a Blossum 62 scoring matrix with a gap penalty of 12, a gap extend penalty of 4, and a frameshift gap penalty of 5. The amino acid residues or nucleotides at corresponding amino acid positions or nucleotide positions are then compared. When a position in the first sequence is occupied by the same amino acid residue or nucleotide as the corresponding position in the second sequence, then the molecules are identical at that position (as used herein amino acid or nucleic acid “identity” is equivalent to amino acid or nucleic acid “homology”). The percent identity between the two sequences is a function of the number of identical positions shared by the sequences.

[0139] In a preferred embodiment, the length of a reference sequence aligned for comparison purposes is at least 30%, preferably at least 40%, more preferably at least 50%, even more preferably at least 60%, and even more preferably at least 70%, 80%, 85%, 90%, 91%, 92%, 93%, 94%, 95%, 96%, 97%, 98%, 99%, or 100% of the length of the reference sequence. For example, the reference sequence may be the length of the immunoglobulin variable domain sequence.

[0140] As used herein, the term “substantially identical” (or “substantially homologous”) is used herein to refer to a first amino acid or nucleic acid sequence that contains a sufficient number of identical or equivalent (e.g., with a similar side chain, e.g., conserved amino acid substitutions) amino acid residues or nucleotides to a second amino acid or nucleic acid sequence such that the first and second amino acid or nucleic acid sequences have (or encode proteins having) similar activities, e.g., a binding activity, a binding preference, or a biological activity. In the case of antibodies, the second antibody has the same specificity and has at least 50%, at least 25%, or at least 10% of the affinity relative to the same antigen.

[0141] Sequences similar or homologous (e.g., at least about 85% sequence identity) to the sequences disclosed herein are also part of this application. In some embodiments, the sequence identity can be about 85%, 90%, 91%, 92%, 93%, 94%, 95%, 96%, 97%, 98%, 99% or higher. In addition, substantial identity exists when the nucleic acid segments hybridize under selective hybridization conditions (e.g., highly stringent hybridization conditions), to the complement of the strand. The nucleic acids may be present in whole cells, in a cell lysate, or in a partially purified or substantially pure form.

[0142] As used herein, the term “hybridizes under low stringency, medium stringency, high stringency, or very high stringency conditions” describes conditions for hybridization and washing. Guidance for performing hybridization reactions can be found in Current Protocols in Molecular Biology, John Wiley & Sons, N.Y. (1989), 6.3.1-6.3.6. Aqueous and nonaqueous methods are described in that reference and either can be used. Specific hybridization conditions referred to herein are as follows: (1) low stringency hybridization conditions in 6× sodium chloride/sodium citrate (SSC) at about 45° C., followed by two washes in 0.2×SSC, 0.1% SDS at least at 50° C. (the temperature of the washes can be increased to 55° C. for low stringency conditions); (2) medium stringency hybridization conditions in 6×SSC at about 45° C., followed by one or more washes in 0.2×SSC, 0.1% SDS at 60° C.; (3) high stringency hybridization conditions in 6×SSC at about 45° C., followed by one or more washes in 0.2×SSC, 0.1% SDS at 65° C.; and (4) very high stringency hybridization conditions are 0.5M sodium phosphate, 7% SDS at 65° C., followed by one or more washes at 0.2×SSC, 1% SDS at 65° C. Very high stringency conditions (4) are the preferred conditions and the ones that should be used unless otherwise specified. The disclosure includes nucleic acids that hybridize with low, medium, high, or very high stringency to a nucleic acid described herein or to a complement thereof, e.g., nucleic acids encoding a binding protein described herein. The nucleic acids can be the same length or within 30, 20, or 10% of the length of the reference nucleic acid. The nucleic acid can correspond to a region encoding an immunoglobulin variable domain sequence described herein.

[0143] An MMP-9/MMP-2 binding protein or MMP-9 binding protein may have mutations (e.g., at least one, two, or four, and/or less than 15, 10, 5, or 3) relative to a binding protein described herein (e.g., conservative or non-essential amino acid substitutions), which do not have a substantial effect on protein function. Whether or not a particular substitution will be tolerated, i.e., will not adversely affect biological properties, such as binding activity can be predicted, e.g., by evaluating whether the mutation is conservative or by the method of Bowie, et al. (1990) Science 247:1306-1310.

[0144] A “conservative amino acid substitution” is one in which the amino acid residue is replaced with an amino acid residue having a similar side chain. Families of amino acid residues having similar side chains have been defined in the art. These families include amino acids with basic side chains (e.g., lysine, arginine, histidine), acidic side chains (e.g., aspartic acid, glutamic acid), uncharged polar side chains (e.g., glycine, asparagine, glutamine, serine, threonine, tyrosine, cysteine), nonpolar side chains (e.g., alanine, valine, leucine, isoleucine, proline, phenylalanine, methionine, tryptophan), beta-branched side chains (e.g., threonine, valine, isoleucine) and aromatic side chains (e.g., tyrosine, phenylalanine, tryptophan, histidine). It is possible for many framework and CDR amino acid residues to include one or more conservative substitutions.

[0145] Motif sequences for biopolymers can include positions which can be varied amino acids. For example, the symbol “X” in such a context generally refers to any amino acid (e.g., any of the twenty natural amino acids or any of the nineteen non-cysteine amino acids). Other allowed amino acids can also be indicated for example, using parentheses and slashes. For example, “(A/W/F/N/Q)” means that alanine, tryptophan, phenylalanine, asparagine, and glutamine are allowed at that particular position.

[0146] A “non-essential” amino acid residue is a residue that can be altered from the wild-type sequence of the binding agent, e.g., the antibody, without abolishing or more preferably, without substantially altering a biological activity, whereas changing an “essential” amino acid residue results in a substantial loss of activity.

[0147] The term “cognate ligand” refers to a naturally occurring ligand of an MMP-9 and/or MMP-2, including naturally occurring variants thereof (e.g., splice variants, naturally occurring mutants, and isoforms).

[0148] Statistical significance can be determined by any art known method. Exemplary statistical tests include: the Students t-test, Mann Whitney U non-parametric test, and Wilcoxon non-parametric statistical test. Some statistically significant relationships have a P value of less than 0.05 or 0.02. Particular binding proteins may show a difference, e.g., in specificity or binding, that are statistically significant (e.g., P value <0.05 or 0.02). The terms “induce”, “inhibit”, “potentiate”, “elevate”, “increase”, “decrease” or the like, e.g., which denote distinguishable qualitative or quantitative differences between two states, and may refer to a difference, e.g., a statistically significant difference, between the two states.

### MMP-9/MMP-2 Binding Proteins

[0149] The disclosure provides proteins that bind to MMP-9 (e.g., human MMP-9) and MMP-2 (e.g., human MMP-2) and include at least one immunoglobin variable region. For example, the MMP-9/MMP-2 binding protein includes a heavy chain (HC) immunoglobulin variable domain sequence and a light chain (LC) immunoglobulin variable domain sequence. An exemplary MMP-9/MMP-2 binding protein is described herein.

[0150] The MMP-9/MMP-2 binding protein may be an isolated protein (e.g., at least 70, 80, 85, 90, 91, 92, 93, 94, 95, 96, 97, 98, or 99% free of other proteins).

[0151] The MMP-9/MMP-2 binding protein may additionally inhibit MMP-9, e.g., human MMP-9 and/or MMP-2, e.g., human MMP-2. The binding protein can inhibit the catalytic activity of MMP-9 (e.g., human MMP-9) and/or MMP-2 (e.g., human MMP-2). In one embodiment, the protein binds the catalytic domain of human MMP-9, e.g., the protein contacts residues in or near the active site of MMP-9 and/or the protein binds the catalytic domain of human MMP-2, e.g., the protein contacts residues in or near the active site of MMP-2. In some embodiments, the protein does not contact residues in or near the active site of MMP-9 but instead binds elsewhere on MMP-9 and causes a steric change in MMP-9 that affects (e.g., inhibits) its activity. In other embodiments, the protein does not contact residues in or near the active site of MMP-2 but instead binds elsewhere on MMP-2 and causes a steric change in MMP-2 that affects (e.g., inhibits) its activity.

[0152] Exemplary MMP-9/MMP-2 binding proteins are M0237-D02, M0275-D03, M0273-G07, M0273-C10, M0273-A11, M0276-F11, M0275-E12, M0274-G08, M0272-H08, M0273-B10, M0301-D12, M0307-F04, M0299-A12, M0301-A09, M0256-D11, M0299-C09, M0306-D04, X0106-A01, X0106-B02, X0106-C04, X0106-E4, and X0106-F05.

[0153] MMP-9/MMP-2 binding proteins may be antibodies. MMP-9/MMP-2 binding antibodies may have their HC and LC variable domain sequences included in a single polypeptide (e.g., scFv), or on different polypeptides (e.g., IgG or Fab).

### MMP-9 Binding Proteins

[0154] The disclosure provides proteins that bind to MMP-9 (e.g., human MMP-9) and include at least one immunoglobin variable region. For example, the MMP-9 binding protein includes a heavy chain (HC) immunoglobulin variable domain sequence and a light chain (LC) immunoglobulin variable domain sequence. A number of exemplary MMP-9 binding proteins are described herein.

[0155] The MMP-9 binding protein may be an isolated protein (e.g., at least 70, 80, 85, 90, 91, 92, 93, 94, 95, 96, 97, 98, or 99% free of other proteins).

[0156] In one embodiment, the MMP-9 binding protein does not bind to MMP-2.

[0157] The MMP-9 binding protein may additionally inhibit MMP-9, e.g., human MMP-9. The binding protein can inhibit the catalytic activity of MMP-9 (e.g., human MMP-9). In one embodiment, the protein binds the catalytic domain of human MMP-9, e.g., the protein contacts residues in or near the active site of MMP-9. In some embodiments, the protein does not contact residues in or near the active site of MMP-9 but instead binds elsewhere on MMP-9 and causes a steric change in MMP-9 that affects (e.g., inhibits) its activity. In some embodiments, the MMP-9 binding protein does not inhibit MMP-2, e.g., human MMP-2.

[0158] Exemplary MMP-9 binding proteins include M0279-A03, M0279-B02, M0288-C08, and M0281-F06.

[0159] MMP-9 binding proteins may be antibodies. MMP-9 binding antibodies may have their HC and LC variable domain sequences included in a single polypeptide (e.g., scFv), or on different polypeptides (e.g., IgG or Fab).

[0160] This disclosure is based, in part, on the discovery that human MMP-9 and human MMP-2 have the same or an overlapping epitope that allows a single antibody to bind both with high affinity and that such binding can inhibit both enzymes. Specifically, the region of human MMP-9 that includes amino acids Gly128 to Gly 296 overlaps with the region of human MMP-2 that includes amino acids Arg120 to Pro288. This disclosure is also based, in part, on the discovery that mouse MMP-9 and mouse MMP-2 have an overlapping epitope with human MMP-9 and human MMP-2. Antibody M0237-D02, for example, has high affinity for hMMP-9, hMMP-2 and mMMP-9 but low affinity for mMMP-2. When M0237-D02 was discovered, it was not certain that a single antibody could be found that had improved affinity for all four targets (hMMP-9, hMMP-2, mMMP-9, and mMMP-2). The disclosure demonstrates that binding proteins having improved affinity for all four targets (hMMP-9, hMMP-2, mMMP-9, and mMMP-2) are possible. The disclosure also provides methods of obtaining additional antibodies which bind MMP-9 and MMP-2.

### Matrix Metalloproteinase 9 (MMP-9)

[0161] MMP-9 Sequences. MMP-9 is encoded by a gene designated as MMP9 with full name Matrix metalloproteinase-9 precursor. Synonyms for MMP-9 include matrix metalloproteinase 9, gelatinase B (GELB), 92 kDa gelatinase (CLG4B), 92 kDa type IV collagenase (EC 3.4.24.35). The DNA sequence is known for Homo sapiens and Mus musculus. An exemplary cDNA sequence encoding human MMP9 and the amino acid sequence are shown below. Exemplary cDNA sequences encoding murine MMP9 and amino acid sequences are also shown below. An exemplary MMP-9 protein can include the human or mouse MMP-9 amino acid sequence, a sequence that is 80%, 85%, 90%, 95%, 96%, 97%, 98%, or 99% identical to one of these sequences, or a fragment thereof, e.g., a fragment without the signal sequence or prodomain.

[0162] Table 1 shows the similar genes in other organisms and the percentage of similarity with human MMP-9. No similarity-to-human data found for MMP9 for: chimpanzee (Pan troglodytes), pig (Sus scrofa), cow (Bos taurus), fruit fly (Drosophila melanogaster), worm (Caenorhabditis elegans), baker's yeast (Saccharomyces cerevisiae), tropical clawed frog (Silurana tropicalis), African malaria mosquito (Anopheles gambiae), green algae (Chlamydomonas reinhardtii), soybean (Glycine max), barley (Hordeum vulgare), tomato (Lycopersicon esculentum), rice blast fungus (Magnaporthe grisea), sugarcane (Saccharum officinarum), loblolly pine (Pinus taeda), corn (Zea mays), wheat (Triticum aestivum), Alicante grape (Vitis vinifera), bread mold (Neurospora crassa), fission yeast (Schizosaccharomyces pombe), sea squirt (Ciona intestinalis), amoeba (Dictyostelium discoideum), A. gosspyii yeast (Ashbya gossypii), K. lactis yeast (Kluyveromyces lactis), medicago trunc (Medicago truncatula), malaria parasite (Plasmodium falciparum), schistosome parasite (Schistosoma mansoni), sorghum (Sorghum bicolor), toxoplasmosis (Toxoplasma gondii).

[0163] cDNA and Amino Acid Sequences of Human MMP9

| | |
|---|---|
| ACCESSION | AK123156 |
| VERSION | AK123156.1 GI: 34528630 |

| translation = “MARKGARRPRQGPGSHKWLQPGSRREKERIPQPPPPARPPRDAA | |
|---|---|
| PRRVLVPAVRRVPESGHFAGRPWAPQCHPKGLRRPSAESHSVAQAGVQCHDLGSLQPP | |
| PPSSGDSPASASRVAGITSTVPGTLSALDDCCLITELPYKPPAVLY” | |
| 1 | acactttgcg ttccgcggcc ccggcccctt ggtttcctag tcctggctcc attcccctct |
| 61 | caggcctagg gctgggaccc ctccccgccc ccggtcttgg ccctgccccc ttcaacagac |
| 121 | ggtccgcccc ggcccctccc cctcgtcccg cccggccctg gcaggccccg ccccctgcgg |
| 181 | cctctacctt tgacgtcttc ccccgggagg tggcgggggt ctgcgaccga atgccggcgg |
| 241 | gactctgggt cagggcttct ggcgggccct gcggggggca gcgaggtgac cgtgaacctg |
| 301 | cggctcatgg cgcggaaagg agccaggcgg ccgcggcaag gtccgggatc gcacaagtgg |
| 361 | ctgcaaccag gctctaggag ggagaaagag cggatccccc aaccccctcc gcccgcccgc |
| 421 | cccccgcgag acgcggcgcc gcgcagggtc ctagtgcccg ctgtgcgaag ggttcctgaa |
| 481 | tctggccact tcgctgggag gccctgggct ccccagtgcc acccgaaggg cctgaggagg |
| 541 | ccatctgcag aatctcactc tgtcgcccag gccggagtgc agtgtcatga tcttggctca |
| 601 | ctgcaacctc cgcctcccag ttcaggagat tctcctgcct cagcctcccg ggtggctggg |
| 661 | attacaagca cagtgcctgg cacattatcg gcacttgatg actgttgtct aataactgag |
| 721 | cttccataca aaccacctgc cgtcctgtac tgaaggagaa agagcttcca gccggggagg |
| 781 | caggaaatct gggtcctggt cttggttgca tccctgactt cctaaatgac ctggagaagg |
| 841 | cctctgcctc tgctgggatc ttgtctgtgc tggggcattt gtttccattt ccaagggctt |
| 901 | tttcttcctc gctcagaatt tgaccactca ctaagaggag cttagtgtgg tgtctcacga |
| 961 | agggatcctc ctcagccctc acctcggtac tggaagacgt cgtgcgtgtc caaaggcacc |
| 1021 | ccggggaaca tccggtccac ctcgctggcg ctccggggat ccaccatctg cgccttcacg |
| 1081 | tcgaacctgc gggcaggcgc ggaggagaca ggtgctgagc cggctagcgg acggaccgac |
| 1141 | ggcgcccggg ctccccctgc cggcggccgc ggcggcgctc acctccagag gcgccgcccg |
| 1201 | ctgaacagca gcatcttccc cctgccactc cggagggccc cggtcacctg ggccacgtcg |
| 1261 | gcgcccaggc ccagcttgtc cagacgcctc gggcccagca ccgacgcgcc tgtgtacacc |
| 1321 | cacacctggc gccctgcagg ggaggagggt cacgtcggtt tgggggcgca gagggagcac |
| 1381 | gtactcctag aacgcgagga gggagattcc ggcgaggcct ttcctagccc gcgtgcccgc |
| 1441 | agtccctgca acccaggggc agaggcgctg ggtagagcga cgcgagggcg tggagaggag |
| 1501 | ggggcagaaa ctcagccgcc cctacgtttg ctaaactgcg tccgccaggg ggcgtatttt |
| 1561 | tctaaaacgc acaagacgtt tcgtgggtta tcgatggtct cttgagcctc cttgactgat |
| 1621 | ggggattgac cgggcggggg agggaaagta ggtaactaac cagagaagaa gaaaagcttc |
| 1681 | ttggagagcg gctcctcaaa gaccgagtcc agcttgcggg gcagcgcggg ccacttgtcg |
| 1741 | gcgataagga aggggccctg cggccggctc cccctgccct cagagaatcg ccagtacttc |
| 1801 | ctgagaaagc gaggagggaa aggacgggct ctaagccttg gacacagggc cagtgggcgg |
| 1861 | gaagggacgg gcagcccctc cgcaaagccc cctcccgcat ccacacaacc ccgcctcctc |
| 1921 | acccatcctt gaacaaatac agctggttcc caatc |

[0164] cDNA and Amino Acid Sequences of Mouse MMP9

| | |
|---|---|
| ACCESSION | NM_013599 |
| VERSION | NM_013599.2 GI: 31560795 |

| translation = “MSPWQPLLLALLAFGCSSAAPYQRQPTFVVFPKDLKTSNLTDTQ | |
|---|---|
| LAEAYLYRYGYTRAAQMMGEKQSLRPALLMLQKQLSLPQTGELDSQTLKAIRTPRCGV | |
| PDVGRFQTFKGLKWDHHNITYWIQNYSEDLPRDMIDDAFARAFAVWGEVAPLTFTRVY | |
| GPEADIVIQFGVAEHGDGYPFDGKDGLLAHAFPPGAGVQGDAHFDDDELWSLGKGVVI | |
| PTYYGNSNGAPCHFPFTFEGRSYSACTTDGRNDGTPWCSTTADYDKDGKFGFCPSERL | |
| YTEHGNGEGKPCVFPFIFEGRSYSACTTKGRSDGYRWCATTANYDQDKLYGFCPTRVD | |
| ATVVGGNSAGELCVFPFVFLGKQYSSCTSDGRRDGRLWCATTSNFDTDKKWGFCPDQG | |
| YSLFLVAAHEFGHALGLDHSSVPEALMYPLYSYLEGFPLNKDDIDGIQYLYGRGSKPD | |
| PRPPATTTTEPQPTAPPTMCPTIPPTAYPTVGPTVGPTGAPSPGPTSSPSPGPTGAPS | |
| PGPTAPPTAGSSEASTESLSPADNPCNVDVFDAIAEIQGALHFFKDGWYWKFLNHRGS | |
| PLQGPFLTARTWPALPATLDSAFEDPQTKRVFFFSGRQMWVYTGKTVLGPRSLDKLGL | |
| GPEVTHVSGLLPRRLGKALLFSKGRVWRFDLKSQKVDPQSVIRVDKEFSGVPWNSHDI | |
| FQYQDKAYFCHGKFFWRVSFQNEVNKVDHEVNQVDDVGYVTYDLLQCP” | |
| 1 | ctcaccatga gtccctggca gcccctgctc ctggctctcc tggctttcgg ctgcagctct |
| 61 | gctgcccctt accagcgcca gccgactttt gtggtcttcc ccaaagacct gaaaacctcc |
| 121 | aacctcacgg acacccagct ggcagaggca tacttgtacc gctatggtta cacccgggcc |
| 181 | gcccagatga tgggagagaa gcagtctcta cggccggctt tgctgatgct tcagaagcag |
| 241 | ctctccctgc cccagactgg tgagctggac agccagacac taaaggccat tcgaacacca |
| 301 | cgctgtggtg tcccagacgt gggtcgattc caaaccttca aaggcctcaa gtgggaccat |
| 361 | cataacatca catactggat ccaaaactac tctgaagact tgccgcgaga catgatcgat |
| 421 | gacgccttcg cgcgcgcctt cgcggtgtgg ggcgaggtgg cacccctcac cttcacccgc |
| 481 | gtgtacggac ccgaagcgga cattgtcatc cagtttggtg tcgcggagca cggagacggg |
| 541 | tatcccttcg acggcaagga cggccttctg gcacacgcct ttccccctgg cgccggcgtt |
| 601 | cagggagatg cccatttcga cgacgacgag ttgtggtcgc tgggcaaagg cgtcgtgatc |
| 661 | cccacttact atggaaactc aaatggtgcc ccatgtcact ttcccttcac cttcgaggga |
| 721 | cgctcctatt cggcctgcac cacagacggc cgcaacgacg gcacgccttg gtgtagcaca |
| 781 | acagctgact acgataagga cggcaaattt ggtttctgcc ctagtgagag actctacacg |
| 841 | gagcacggca acggagaagg caaaccctgt gtgttcccgt tcatctttga gggccgctcc |
| 901 | tactctgcct gcaccactaa aggccgctcg gatggttacc gctggtgcgc caccacagcc |
| 961 | aactatgacc aggataaact gtatggcttc tgccctaccc gagtggacgc gaccgtagtt |
| 1021 | gggggcaact cggcaggaga gctgtgcgtc ttccccttcg tcttcctggg caagcagtac |
| 1081 | tcttcctgta ccagcgacgg ccgcagggat gggcgcctct ggtgtgcgac cacatcgaac |
| 1141 | ttcgacactg acaagaagtg gggtttctgt ccagaccaag ggtacagcct gttcctggtg |
| 1201 | gcagcgcacg agttcggcca tgcactgggc ttagatcatt ccagcgtgcc ggaagcgctc |
| 1261 | atgtacccgc tgtatagcta cctcgagggc ttccctctga ataaagacga catagacggc |
| 1321 | atccagtatc tgtatggtcg tggctctaag cctgacccaa ggcctccagc caccaccaca |
| 1381 | actgaaccac agccgacagc acctcccact atgtgtccca ctatacctcc cacggcctat |
| 1441 | cccacagtgg gccccacggt tggccctaca ggcgccccct cacctggccc cacaagcagc |
| 1501 | ccgtcacctg gccctacagg cgccccctca cctggcccta cagcgccccc tactgcgggc |
| 1561 | tcttctgagg cctctacaga gtctttgagt ccggcagaca atccttgcaa tgtggatgtt |
| 1621 | tttgatgcta ttgctgagat ccagggcgct ctgcatttct tcaaggacgg ttggtactgg |
| 1681 | aagttcctga atcatagagg aagcccatta cagggcccct tccttactgc ccgcacgtgg |
| 1741 | ccagccctgc ctgcaacgct ggactccgcc tttgaggatc cgcagaccaa gagggttttc |
| 1801 | ttcttctctg gacgtcaaat gtgggtgtac acaggcaaga ccgtgctggg ccccaggagt |
| 1861 | ctggataagt tgggtctagg cccagaggta acccacgtca gcgggcttct cccgcgtcgt |
| 1921 | ctcgggaagg ctctgctgtt cagcaagggg cgtgtctgga gattcgactt gaagtctcag |
| 1981 | aaggtggatc cccagagcgt cattcgcgtg gataaggagt tctctggtgt gccctggaac |
| 2041 | tcacacgaca tcttccagta ccaagacaaa gcctatttct gccatggcaa attcttctgg |
| 2101 | cgtgtgagtt tccaaaatga ggtgaacaag gtggaccatg aggtgaacca ggtggacgac |
| 2161 | gtgggctacg tgacctacga cctcctgcag tgcccttgaa ctagggctcc ttctttgctt |
| 2221 | caaccgtgca gtgcaagtct ctagagacca ccaccaccac caccacacac aaaccccatc |
| 2281 | cgagggaaag gtgctagctg gccaggtaca gactggtgat ctcttctaga gactgggaag |
| 2341 | gagtggaggc aggcagggct ctctctgccc accgtccttt cttgttggac tgtttctaat |
| 2401 | aaacacggat ccccaacctt ttccagctac tttagtcaat cagcttatct gtagttgcag |
| 2461 | atgcatccga gcaagaagac aactttgtag ggtggattct gaccttttat ttttgtgtgg |
| 2521 | cgtctgagaa ttgaatcagc tggcttttgt gacaggcact tcaccggcta aaccacctct |
| 2581 | cccgactcca gcccttttat ttattatgta tgaggttatg ttcacatgca tgtatttaac |
| 2641 | ccacagaatg cttactgtgt gtcgggcgcg gctccaaccg ctgcataaat attaaggtat |
| 2701 | tcagttgccc ctactggaag gtattatgta actatttctc tcttacattg gagaacacca |
| 2761 | ccgagctatc cactcatcaa acatttattg agagcatccc tagggagcca ggctctctac |
| 2821 | tgggcgttag ggacagaaat gttggttctt ccttcaagga ttgctcagag attctccgtg |
| 2881 | tcctgtaaat ctgctgaaac cagaccccag actcctctct ctcccgagag tccaactcac |
| 2941 | tcactgtggt tgctggcagc tgcagcatgc gtatacagca tgtgtgctag agaggtagag |
| 3001 | ggggtctgtg cgttatggtt caggtcagac tgtgtcctcc aggtgagatg acccctcagc |
| 3061 | tggaactgat ccaggaagga taaccaagtg tcttcctggc agtctttttt aaataaatga |
| 3121 | ataaatgaat atttacttaa aaaaaaaaaa aaaaaaaaaa aaaaaaaaaa aaaaaaaaaa |
| 3181 | aaaaa |
| // | |

| ACCESSION NP_038627 | |
|---|---|
| VERSION NP_038627.1 GI:7305277 | |
| 1 | mspwqpllla llafgcssaa pygrqptfvv fpkdlktsnl tdtqlaeayl yrygytraaq |
| 61 | mmgekgslrp allmlqkqls lpqtgeldsq tlkairtprc gvpdvgrfqt fkglkwdhhn |
| 121 | itywiqnyse dlprdmidda farafavwge vapltftrvy gpeadiviqf gvaehgdgyp |
| 181 | fdgkdgllah afppgagvqg dahfdddelw slgkgvvipt yygnsngapc hfpftfegrs |
| 241 | ysacttdgrn dgtpwcstta dydkdgkfgf cpserlyteh gngegkpcvf pfifegrsys |
| 301 | acttkgrsdg yrwcattany dqdklygfcp trvdatvvgg nsagelcvfp fvflgkqyss |
| 361 | ctsdgrrdgr lwcattsnfd tdkkwgfcpd qgyslflvaa hefghalgld hssvpealmy |
| 421 | plysylegfp lnkddidgiq ylygrgskpd prppatttte pqptapptmc ptipptaypt |
| 481 | vgptvgptga pspgptssps pgptgapspg ptapptagss easteslspa dnpcnvdvfd |
| 541 | aiaeiggalh ffkdgwywkf lnhrgsplqg pfltartwpa 1patldsafe dpqtkrvfff |
| 601 | sgrqmwvytg ktvlgprsld klglgpevth vsgllprrlg kallfskgry wrfdlksqkv |
| 661 | dpqsvirvdk efsgvpwnsh difqyqdkay fchgkffwry sfqnevnkvd hevnqvddvg |
| 721 | yvtydllqcp |
| // | |

TABLE 1
MMP-9 orthologs from nine species

| | | | | Human | |
|---|---|---|---|---|---|
| Organism | Gene | Locus | Description | Similarity | NCBI accessions |
| dog | MMP9¹ | — | matrix metallopeptidase 9 | 85.46(n) | 403885 NM_001003219.1 NP_001003219.1 |
| (Canis | | | (gelatinase B, 92 kDa | 80.97(a) | |
| familiaris) | | | gelatinase | | |
| rat | Mmp9¹ | — | matrix metallopeptidase 9 | 79.15(n) | 81687 NM_031055.1 NP_112317.1 |
| (Rattus | | | | 74.89(a) | |
| norvegicus) | | | | | |
| mouse | Mmp9^{1, 4} | 2 (96.00 cM)⁴ | matrix metallopeptidase | 78.69(n)¹ | 17395¹ NM_013599.2¹ NP_038627.1¹ |
| (Mus | | | 9^{1, 4} | 75(a)¹ | AK004651⁴ AK142787⁴ |
| musculus) | | | | | (see all 16) |
| chicken | LOC395387¹ | — | matrix metallopeptidase 9 | 66.96(n) | 395387 NM_204667.1 NP_989998.1 |
| (Gallus | | | (gelatinase B, 92 kDa | 62.54(a) | |
| gallus) | | | gelatinase | | |
| zebrafish | wufb02g06^{1~} | — | Danio rerio cDNA clone | 70.96(n) | BC053292.1 |
| (Danio rerio) | | | MGC64165 | | |
| | | | IMAGE6797338, | | |
| | | | complete | | |
| African | MGC69080^{1~} | — | hypothetical protein | 72.25(n) | BC057745.1 |
| clawed frog | | | MGC69080 | | |
| (Xenopus | | | | | |
| laevis) | | | | | |
| rainbow | Omy.10476^{1~} | — | Oncorhynchus mykiss | 74.67(n) | AJ320533.1 |
| trout | | | mRNA for matrix | | |
| (Oncorhynchus | | | metalloproteinase | | |
| mykiss) | | | | | |
| thale cress | MMP¹ | — | MMP (MATRIX | 53(n) | 843353 NM_105685.3 NP_177174.1 |
| (Arabidopsis | | | METALLOPROTEINASE) | 46.85(a) | |
| thaliana) | | | metalloendopeptidase/ | | |
| rice | P0516G10.18¹ | — | putative zinc | 51.98(n) | 3063368 XM_467714.1 XP_467714.1 |
| (Oryza | | | metalloproteinase | 41.81(a) | |
| sativa) | | | | | |

[0165] Domains of MMP-9. MMP-9 belongs to the peptidase M10A family. MMP-9 consists of five domains; the amino-terminal and zinc-binding domains shared by all members of the secreted metalloprotease gene family, the collagen-binding fibronectin-like domain also present in the 72-kDa type IV collagenase, a carboxyl-terminal hemopexin-like domain shared by all known enzymes of this family with the exception of PUMP-1, and a unique 54-amino-acid-long proline-rich domain homologous to the alpha 2 chain of type V collagen (Wilhelm et al. (1989) J. Biol. Chem. 264, 17213-17221) (Table 2).

TABLE 2
MMP-9 domains

| | | | |
|---|---|---|---|
| FT | SIGNAL | 1 19 | |
| FT | PROPEP | 20 93 | Activation peptide. |
| FT | CHAIN | 94 ? | 67 kDa matrix metalloproteinase-9. |
| FT | CHAIN | 107 707 | 82 kDa matrix metalloproteinase-9. |
| FT | PROPEP | ? 707 | Removed in 64 kDa matrix |
| FT | | | metalloproteinase-9 and 67 kDa matrix |
| FT | | | metalloproteinase-9. |
| FT | DOMAIN | 225 273 | Fibronectin type-II 1. |
| FT | DOMAIN | 283 331 | Fibronectin type-II 2. |
| FT | DOMAIN | 342 390 | Fibronectin type-II 3. |
| FT | DOMAIN | 513 707 | Hemopexin-like. |
| FT | ACT_SITE | 402 402 | |
| FT | METAL | 131 131 | Calcium 1. |
| FT | METAL | 165 165 | Calcium 2 (via carbonyl oxygen). |
| FT | METAL | 175 175 | Zinc 1 (structural). |
| FT | METAL | 177 177 | Zinc 1 (structural). |
| FT | METAL | 182 182 | Calcium 3. |
| FT | METAL | 183 183 | Calcium 3 (via carbonyl oxygen). |
| FT | METAL | 185 185 | Calcium 3 (via carbonyl oxygen). |
| FT | METAL | 187 187 | Calcium 3 (via carbonyl oxygen). |
| FT | METAL | 190 190 | Zinc 1 (structural). |
| FT | METAL | 197 197 | Calcium 2 (via carbonyl oxygen). |
| FT | METAL | 199 199 | Calcium 2 (via carbonyl oxygen). |
| FT | METAL | 201 201 | Calcium 2. |
| FT | METAL | 203 203 | Zinc 1 (structural). |
| FT | METAL | 205 205 | Calcium 3. |
| FT | METAL | 206 206 | Calcium 1. |
| FT | METAL | 208 208 | Calcium 1. |
| FT | METAL | 208 208 | Calcium 3. |
| FT | METAL | 401 401 | Zinc 2 (catalytic). |
| FT | METAL | 405 405 | Zinc 2 (catalytic). |
| FT | METAL | 411 411 | Zinc 2 (catalytic). |
| FT | SITE | 59 60 | Cleavage (by MMP3). |
| FT | SITE | 99 99 | Cysteine switch (By similarity). |
| FT | SITE | 106 107 | Cleavage (by MMP3). |
| FT | CARBOHYD | 38 38 | N-linked (GlcNAc . . . ) (Potential). |
| FT | CARBOHYD | 120 120 | N-linked (GlcNAc . . . ) (Potential). |
| FT | CARBOHYD | 127 127 | N-linked (GlcNAc . . . ) (Potential). |
| FT | DISULFID | 230 256 | By similarity. |
| FT | DISULFID | 244 271 | By similarity. |
| FT | DISULFID | 288 314 | By similarity. |
| FT | DISULFID | 302 329 | By similarity. |
| FT | DISULFID | 347 373 | By similarity. |
| FT | DISULFID | 361 388 | By similarity. |
| FT | DISULFID | 516 704 | |
| FT | VARIANT | 20 20 | A -> V (in dbSNP:rs1805088). |
| FT | VARIANT | 82 82 | E -> K (in dbSNP:rs1805089). |
| FT | VARIANT | 127 127 | N -> K (in dbSNP:rs3918252). |
| FT | VARIANT | 239 239 | R -> H. |
| FT | VARIANT | 279 279 | R -> Q (common polymorphism; |
| FT | | | dbSNP:rs17576). |
| FT | VARIANT | 571 571 | F -> V. |
| FT | VARIANT | 574 574 | P -> R (in dbSNP:rs2250889). |
| FT | VARIANT | 668 668 | R -> Q (in dbSNP:rs17577). |
| FT | TURN | 32 33 | |
| FT | HELIX | 41 51 | |
| FT | TURN | 52 53 | |
| FT | HELIX | 68 78 | |
| FT | TURN | 79 79 | |
| FT | HELIX | 88 94 | |
| FT | TURN | 95 95 | |
| FT | STRAND | 103 105 | |
| FT | STRAND | 119 125 | |
| FT | STRAND | 130 132 | |
| FT | HELIX | 134 149 | |
| FT | TURN | 150 150 | |
| FT | STRAND | 151 153 | |
| FT | STRAND | 155 158 | |
| FT | TURN | 162 163 | |
| FT | STRAND | 164 171 | |
| FT | STRAND | 176 178 | |
| FT | STRAND | 183 186 | |
| FT | STRAND | 189 191 | |
| FT | STRAND | 194 196 | |
| FT | TURN | 197 200 | |
| FT | STRAND | 202 205 | |
| FT | TURN | 206 207 | |
| FT | STRAND | 213 219 | |
| FT | HELIX | 220 231 | |
| FT | TURN | 232 233 | |
| FT | TURN | 240 241 | |
| FT | TURN | 243 244 | |
| FT | STRAND | 245 247 | |
| FT | STRAND | 255 261 | |
| FT | HELIX | 262 265 | |
| FT | STRAND | 268 270 | |
| FT | TURN | 274 276 | |
| FT | STRAND | 279 283 | |
| FT | TURN | 284 285 | |
| FT | STRAND | 290 294 | |
| FT | TURN | 295 296 | |
| FT | STRAND | 297 301 | |
| FT | TURN | 305 306 | |
| FT | STRAND | 313 319 | |
| FT | HELIX | 320 323 | |
| FT | STRAND | 326 328 | |
| FT | HELIX | 333 335 | |
| FT | TURN | 340 344 | |
| FT | STRAND | 349 353 | |
| FT | TURN | 354 355 | |
| FT | STRAND | 356 358 | |
| FT | TURN | 364 365 | |
| FT | STRAND | 372 378 | |
| FT | HELIX | 379 382 | |
| FT | STRAND | 385 387 | |
| FT | HELIX | 395 406 | |
| FT | TURN | 407 408 | |
| FT | TURN | 415 416 | |
| FT | TURN | 418 419 | |
| FT | HELIX | 433 442 | |
| FT | STRAND | 512 517 | |
| FT | HELIX | 515 517 | |
| FT | STRAND | 522 527 | |
| FT | TURN | 528 529 | |
| FT | STRAND | 530 535 | |
| FT | TURN | 536 537 | |
| FT | STRAND | 538 542 | |
| FT | STRAND | 545 547 | |
| FT | STRAND | 551 555 | |
| FT | HELIX | 556 559 | |
| FT | TURN | 561 562 | |
| FT | STRAND | 568 572 | |
| FT | TURN | 574 576 | |
| FT | STRAND | 579 583 | |
| FT | TURN | 584 585 | |
| FT | STRAND | 586 591 | |
| FT | TURN | 592 593 | |
| FT | STRAND | 594 600 | |
| FT | HELIX | 601 604 | |
| FT | TURN | 605 605 | |
| FT | TURN | 608 609 | |
| FT | STRAND | 615 618 | |
| FT | TURN | 621 622 | |
| FT | STRAND | 623 628 | |
| FT | TURN | 629 630 | |
| FT | STRAND | 631 636 | |
| FT | TURN | 637 640 | |
| FT | HELIX | 644 646 | |
| FT | HELIX | 650 653 | |
| FT | TURN | 655 656 | |
| FT | STRAND | 662 667 | |
| FT | TURN | 668 669 | |
| FT | STRAND | 670 675 | |
| FT | TURN | 676 677 | |
| FT | STRAND | 678 683 | |
| FT | TURN | 686 687 | |
| FT | STRAND | 690 696 | |
| FT | TURN | 697 700 | |
| FT | TURN | 702 703 | |

[0166] Factors that regulate MMP-9. The catalytic activity of MMP-9 is inhibited by histatin-3 1/24 (histatin-5). MMP-9 is activated by urokinase-type plasminogen activator; plasminogen; IL-1beta, 4-aminophenylmercuric acetate and phorbol ester. MMP-9 exists as monomer, disulfide-linked homodimer, and as a heterodimer with a 25 kDa protein. Macrophages and transformed cell lines produce only the monomeric MMP-9, the hetrodimeric form is produced by normal alveolar macrophages and granulocytes. The processing of the precursor yields different active forms of 64, 67 and 82 kDa. Sequentially processing by MMP-3 yields the 82 kDa matrix metalloproteinase-9. In arthritis patients, this enzyme can contribute to the pathogenesis of joint destruction and can be a useful marker of disease status.

[0167] Endogenous inhibitors of MMP-9. MMP-9 has a number of endogenous inhibitors. Like other MMPs, MMP-9 is inhibited by TIMPs (Murphy, G., and Willenbrock, F. (1995) Methods Enzymol. 248, 496-510). A characteristic of MMP-9 (and MMP-2) is the ability of their zymogens to form tight non-covalent and stable complexes with TIMPs. It has been shown that pro-MMP-2 binds TIMP-2 (Goldberg et al. (1989) Proc. Natl. Acad. Sci. U.S.A. 86, 8207-8211), whereas pro-MMP-9 binds TIMP-1 (Wilhelm et al. (1989) J. Biol. Chem. 264, 17213-17221). TIMPs typically are slow, tight binding inhibitors. An MMP-9 binding protein (e.g., antibody) selected from a library of phage-displayed proteins can be selected have more rapid kinetics. For example, recombinant TIMP-1 can be administered to inhibit MMP-9, e.g., in combination with an MMP-9 binding protein described herein.

[0168] Small molecule inhibitors of MMP-9. Skiles et al. (2004, Curr Med Chem, 11:2911-77) reported that first generation small-molecule MMP inhibitors had poor bioavailability and the second generation had caused musculoskeletal pain and inflammation. Most small-molecule MMP inhibitors interact with the catalytic zinc but have fairly low affinity. Thus, a higher concentration is needed to have effect. The interaction with the catalytic zinc leads to inhibition of other MMPs and toxic side effects. An MMP-9 binding protein described herein can be used in combination with a small molecule inhibitor. For example, because the inhibitors are used in combination, the dose of the small molecule used can be decreased and therefore result in fewer side effects. Examples of small molecule MMP-9 inhibitors include small synthetic anthranilic acid-based inhibitors (see, e.g., Calbiochem Inhibitor-I, catalogue #444278 and Levin et al., 2001, Bioorg. Med. Chem. Lett. 11:2975-2978).

[0169] Small interfering RNA inhibitors of MMP-9. MMP-9 can be inhibited by small interfering RNA (siRNA). Examples of siRNA that can be used include:

MMP-9 siRNA
5′-GACUUGCCGCGAGACAUGAtt-3′
3′-ttCUGAACGGCGCUCUGUACU-5′
Control RNA (mismatch)
5′-GACUUCGCGGGACACAUGAtt-3′
3′-ttCUGAAGCGCCCUGUGUACU-5′

[0170] See also Kawasaki et al., Feb. 10, 2008, Nat. Med. advance on-line publication doi:10.1038/nm1723. The siRNA can be administered to inhibit MMP-9, e.g., in combination with an MMP-9 binding protein described herein.

### Matrix Metalloproteinase 2 (MMP-2)

[0171] MMP-2 Sequences. MMP-2 is encoded by a gene designated as MMP2 with full name

[0172] Matrix metalloproteinase-9 precursor. Synonyms for MMP-2 include matrix metalloproteinase 2, 72 kDa type IV collagenase precursor (72 kDa gelatinase), Gelatinase A, and TBE-1. The DNA sequence is known for Homo sapiens and Mus musculus. An exemplary cDNA sequence encoding human MMP2 and the amino acid sequence are shown below. Exemplary cDNA sequences encoding murine MMP2 and amino acid sequences are also shown below. An exemplary MMP-2 protein can include the human or mouse MMP-2 amino acid sequence, a sequence that is 80%, 85%, 90%, 95%, 96%, 97%, 98%, or 99% identical to one of these sequences, or a fragment thereof, e.g., a fragment without the signal sequence or prodomain.

[0173] cDNA and Amino Acid Sequences of Human MMP2

Accession BC002576.2
CTCAGGCGGTGGCTGGAGGCTGCGCATCTGGGGCTTTAAACATACAAAGGGATTGCCAGGACCTGCGGCG
GCGGCGGCGGCGGCGGGGGCTGGGGCGCGGGGGCCGGACCATGAGCCGCTGAGCCGGGCAAACCCCAGGC
CACCGAGCCAGCGGACCCTCGGAGCGCAGCCCTGCGCCGCGGAGCAGGCTCCAACCAGGCGGCGACGCGG
CCACACGCACCGAGCCAGCGACCCCCGGGCGACGCGCGGGGCCAGGGAGCGCTACGATGGAGGCGCTAAT
GGCCCGGGGCGCGCTCACGGGTCCCCTGAGGGCGCTCTGTCTCCTGGGCTGCCTGCTGAGCCACGCCGCC
GCCGCGCCGTCGCCCATCATCAAGTTCCCCGGCGATGTCGCCCCCAAAACGGACAAAGAGTTGGCAGTGC
AATACCTGAACACCTTCTATGGCTGCCCCAAGGAGAGCTGCAACCTGTTTGTGCTGAAGGACACACTAAA
GAAGATGCAGAAGTTCTTTGGACTGCCCCAGACAGGTGATCTTGACCAGAATACCATCGAGACCATGCGG
AAGCCACGCTGCGGCAACCCAGATGTGGCCAACTACAACTTCTTCCCTCGCAAGCCCAAGTGGGACAAGA
ACCAGATCACATACAGGATCATTGGCTACACACCTGATCTGGACCCAGAGACAGTGGATGATGCCTTTGC
TCGTGCCTTCCAAGTCTGGAGCGATGTGACCCCACTGCGGTTTTCTCGAATCCATGATGGAGAGGCAGAC
ATCATGATCAACTTTGGCCGCTGGGAGCATGGCGATGGATACCCCTTTGACGGTAAGGACGGACTCCTGG
CTCATGCCTTCGCCCCAGGCACTGGTGTTGGGGGAGACTCCCATTTTGATGACGATGAGCTATGGACCTT
GGGAGAAGGCCAAGTGGTCCGTGTGAAGTATGGCAACGCCGATGGGGAGTACTGCAAGTTCCCCTTCTTG
TTCAATGGCAAGGAGTACAACAGCTGCACTGATACCGGCCGCAGCGATGGCTTCCTCTGGTGCTCCACCA
CCTACAACTTTGAGAAGGATGGCAAGTACGGCTTCTGTCCCCATGAAGCCCTGTTCACCATGGGCGGCAA
CGCTGAAGGACAGCCCTGCAAGTTTCCATTCCGCTTCCAGGGCACATCCTATGACAGCTGCACCACTGAG
GGCCGCACGGATGGCTACCGCTGGTGCGGCACCACTGAGGACTACGACCGCGACAAGAAGTATGGCTTCT
GCCCTGAGACCGCCATGTCCACTGTTGGTGGGAACTCAGAAGGTGCCCCCTGTGTCTTCCCCTTCACTTT
CCTGGGCAACAAATATGAGAGCTGCACCAGCGCCGGCCGCAGTGACGGAAAGATGTGGTGTGCGACCACA
GCCAACTACGATGACGACCGCAAGTGGGGCTTCTGCCCTGACCAAGGGTACAGCCTGTTCCTCGTGGCAG
CCCACGAGTTTGGCCACGCCATGGGGCTGGAGCACTCCCAAGACCCTGGGGCCCTGATGGCACCCATTTA
CACCTACACCAAGAACTTCCGTCTGTCCCAGGATGACATCAAGGGCATTCAGGAGCTCTATGGGGCCTCT
CCTGACATTGACCTTGGCACCGGCCCCACCCCCACACTGGGCCCTGTCACTCCTGAGATCTGCAAACAGG
ACATTGTATTTGATGGCATCGCTCAGATCCGTGGTGAGATCTTCTTCTTCAAGGACCGGTTCATTTGGCG
GACTGTGACGCCACGTGACAAGCCCATGGGGCCCCTGCTGGTGGCCACATTCTGGCCTGAGCTCCCGGAA
AAGATTGATGCGGTATACGAGGCCCCACAGGAGGAGAAGGCTGTGTTCTTTGCAGGGAATGAATACTGGA
TCTACTCAGCCAGCACCCTGGAGCGAGGGTACCCCAAGCCACTGACCAGCCTGGGACTGCCCCCTGATGT
CCAGCGAGTGGATGCCGCCTTTAACTGGAGCAAAAACAAGAAGACATACATCTTTGCTGGAGACAAATTC
TGGAGATACAATGAGGTGAAGAAGAAAATGGATCCTGGCTTTCCCAAGCTCATCGCAGATGCCTGGAATG
CCATCCCCGATAACCTGGATGCCGTCGTGGACCTGCAGGGCGGCGGTCACAGCTACTTCTTCAAGGGTGC
CTATTACCTGAAGCTGGAGAACCAAAGTCTGAAGAGCGTGAAGTTTGGAAGCATCAAATCCGACTGGCTA
GGCTGCTGAGCTGGCCCTGGCTCCCACAGGCCCTTCCTCTCCACTGCCTTCGATACACCGGGCCTGGAGA
ACTAGAGAAGGACCCGGAGGGGCCTGGCAGCCGTGCCTTCAGCTCTACAGCTAATCAGCATTCTCACTCC
TACCTGGTAATTTAAGATTCCAGAGAGTGGCTCCTCCCGGTGCCCAAGAATAGATGCTGACTGTACTCCT
CCCAGGCGCCCCTTCCCCCTCCAATCCCACCAACCCTCAGAGCCACCCCTAAAGAGATCCTTTGATATTT
TCAACGCAGCCCTGCTTTGGGCTGCCCTGGTGCTGCCACACTTCAGGCTCTTCTCCTTTCACAACCTTCT
GTGGCTCACAGAACCCTTGGAGCCAATGGAGACTGTCTCAAGAGGGCACTGGTGGCCCGACAGCCTGGCA
CAGGGCAGTGGGACAGGGCATGGCCAGGTGGCCACTCCAGACCCCTGGCTTTTCACTGCTGGCTGCCTTA
GAACCTTTCTTACATTAGCAGTTTGCTTTGTATGCACTTTGTTTTTTTCTTTGGGTCTTGTTTTTTTTTT
CCACTTAGAAATTGCATTTCCTGACAGAAGGACTCAGGTTGTCTGAAGTCACTGCACAGTGCATCTCAGC
CCACATAGTGATGGTTCCCCTGTTCACTCTACTTAGCATGTCCCTACCGAGTCTCTTCTCCACTGGATGG
AGGAAAACCAAGCCGTGGCTTCCCGCTCAGCCCTCCCTGCCCCTCCCTTCAACCATTCCCCATGGGAAAT
GTCAACAAGTATGAATAAAGACACCTACTGAGTGAAAAAAAAAAAAAAAAAAAAA
/translation = “MEALMARGALTGPLRALCLLGCLLSHAAAAPSPIIKFPGDVAPK
TDKELAVQYLNTFYGCPKESCNLFVLKDTLKKMQKFFGLPQTGDLDQNTIETMRKPRC
GNPDVANYNFFPRKPKWDKNQITYRIIGYTPDLDPETVDDAFARAFQVWSDVTPLRFS
RIHDGEADIMINFGRWEHGDGYPFDGKDGLLAHAFAPGTGVGGDSHFDDDELWTLGEG
QVVRVKYGNADGEYCKFPFLFNGKEYNSCTDTGRSDGFLWCSTTYNFEKDGKYGFCPH
EALFTMGGNAEGQPCKFPFRFQGTSYDSCTTEGRTDGYRWCGTTEDYDRDKKYGFCPE
TAMSTVGGNSEGAPCVFPFTFLGNKYESCTSAGRSDGKMWCATTANYDDDRKWGFCPD
QGYSLFLVAAHEFGHAMGLEHSQDPGALMAPIYTYTKNFRLSQDDIKGIQELYGASPD
IDLGTGPTPTLGPVTPEICKQDIVFDGIAQIRGEIFFFKDRFIWRTVTPRDKPMGPLL
VATFWPELPEKIDAVYEAPQEEKAVFFAGNEYWIYSASTLERGYPKPLTSLGLPPDVQ
RVDAAFNWSKNKKTYIFAGDKFWRYNEVKKKMDPGFPKLIADAWNAIPDNLDAVVDLQ
GGGHSYFFKGAYYLKLENQSLKSVKFGSIKSDWLGC”

[0174] cDNA and Amino Acid Sequences of Mouse MMP2

Accession NM_008610.2
CCAGCCGGCCACATCTGGCGTCTGCCCGCCCTTGTTTCCGCTGCATCCAGACTTCCCTGGTGGCTGGAGG
CTCTGTGTGCATCCAGGAGTTTAGATATACAAAGGGATTGCCAGGACCTGCAAGCACCCGCGGCAGTGGT
GTGTATTGGGACGTGGGACCCCGTTATGAGCTCCTGAGCCCCGAGAAGCAGAGGCAGTAGAGTAAGGGGA
TCGCCGTGCAGGGCAGGCGCCAGCCGGGCGGACCCCAGGGCACAGCCAGAGACCTCAGGGTGACACGCGG
AGCCCGGGAGCGCAACGATGGAGGCACGAGTGGCCTGGGGAGCGCTGGCCGGACCTCTGCGGGTTCTCTG
CGTCCTGTGCTGCCTGTTGGGCCGCGCCATCGCTGCACCATCGCCCATCATCAAGTTCCCCGGCGATGTC
GCCCCTAAAACAGACAAAGAGTTGGCAGTGCAATACCTGAACACTTTCTATGGCTGCCCCAAGGAGAGTT
GCAACCTCTTTGTGCTGAAAGATACCCTCAAGAAGATGCAGAAGTTCTTTGGGCTGCCCCAGACAGGTGA
CCTTGACCAGAACACCATCGAGACCATGCGGAAGCCAAGATGTGGCAACCCAGATGTGGCCAACTACAAC
TTCTTCCCCCGCAAGCCCAAGTGGGACAAGAACCAGATCACATACAGGATCATTGGTTACACACCTGACC
TGGACCCTGAAACCGTGGATGATGCTTTTGCTCGGGCCTTAAAAGTATGGAGCGACGTCACTCCGCTGCG
CTTTTCTCGAATCCATGATGGGGAGGCTGACATCATGATCAACTTTGGACGCTGGGAGCATGGAGATGGA
TACCCATTTGATGGCAAGGATGGACTCCTGGCACATGCCTTTGCCCCGGGCACTGGTGTTGGGGGAGATT
CTCACTTTGATGATGATGAGCTGTGGACCCTGGGAGAAGGACAAGTGGTCCGCGTAAAGTATGGGAACGC
TGATGGCGAGTACTGCAAGTTCCCCTTCCTGTTCAACGGTCGGGAATACAGCAGCTGTACAGACACTGGT
CGCAGTGATGGCTTCCTCTGGTGCTCCACCACATACAACTTTGAGAAGGATGGCAAGTATGGCTTCTGCC
CCCATGAAGCCTTGTTTACCATGGGTGGCAATGCAGATGGACAGCCCTGCAAGTTCCCGTTCCGCTTCCA
GGGCACCTCCTACAACAGCTGTACCACCGAGGGCCGCACCGATGGCTACCGCTGGTGTGGCACCACCGAG
GACTATGACCGGGATAAGAAGTATGGATTCTGTCCCGAGACCGCTATGTCCACTGTGGGTGGAAATTCAG
AAGGTGCCCCATGTGTCTTCCCCTTCACTTTCCTGGGCAACAAGTATGAGAGCTGCACCAGCGCCGGCCG
CAACGATGGCAAGGTGTGGTGTGCGACCACAACCAACTACGATGATGACCGGAAGTGGGGCTTCTGTCCT
GACCAAGGATATAGCCTATTCCTCGTGGCAGCCCATGAGTTCGGCCATGCCATGGGGCTGGAACACTCTC
AGGACCCTGGAGCTCTGATGGCCCCGATCTACACCTACACCAAGAACTTCCGATTATCCCATGATGACAT
CAAGGGGATCCAGGAGCTCTATGGGCCCTCCCCCGATGCTGATACTGACACTGGTACTGGCCCCACACCA
ACACTGGGACCTGTCACTCCGGAGATCTGCAAACAGGACATTGTCTTTGATGGCATCGCTCAGATCCGTG
GTGAGATCTTCTTCTTCAAGGACCGGTTTATTTGGCGGACAGTGACACCACGTGACAAGCCCACAGGTCC
CTTGCTGGTGGCCACATTCTGGCCTGAGCTCCCAGAAAAGATTGACGCTGTGTATGAGGCCCCACAGGAG
GAGAAGGCTGTGTTCTTCGCAGGGAATGAGTACTGGGTCTATTCTGCTAGTACTCTGGAGCGAGGATACC
CCAAGCCACTGACCAGCCTGGGGTTGCCCCCTGATGTCCAGCAAGTAGATGCTGCCTTTAACTGGAGTAA
GAACAAGAAGACATACATCTTTGCAGGAGACAAGTTCTGGAGATACAATGAAGTGAAGAAGAAAATGGAC
CCCGGTTTCCCTAAGCTCATCGCAGACTCCTGGAATGCCATCCCTGATAACCTGGATGCCGTCGTGGACC
TGCAGGGTGGTGGTCATAGCTACTTCTTCAAGGGTGCTTATTACCTGAAGCTGGAGAACCAAAGTCTCAA
GAGCGTGAAGTTTGGAAGCATCAAATCAGACTGGCTGGGCTGCTGAGCTGGCCCTGTTCCCACGGGCCCT
ATCATCTTCATCGCTGCACACCAGGTGAAGGATGTGAAGCAGCCTGGCGGCTCTGTCCTCCTCTGTAGTT
AACCAGCCTTCTCCTTCACCTGGTGACTTCAGATTTAAGAGGGTGGCTTCTTTTTGTGCCCAAAGAAAGG
TGCTGACTGTACCCTCCCGGGTGCTGCTTCTCCTTCCTGCCCACCCTAGGGGATGCTTGGATATTTGCAA
TGCAGCCCTCCTCTGGGCTGCCCTGGTGCTCCACTCTTCTGGTTCTTCAACATCTATGACCTTTTTATGG
CTTTCAGCACTCTCAGAGTTAATAGAGACTGGCTTAGGAGGGCACTGGTGGCCCTGTTAACAGCCTGGCA
TGGGGCAGTGGGGTACAGGTGTGCCAAGGTGGAAATCAGAGACACCTGGTTTCACCCTTTCTGCTGCCCA
GACACCTGCACCACCTTAACTGTTGCTTTTGTATGCCCTTCGCTCGTTTCCTTCAACCTTTTCAGTTTTC
CACTCCACTGCATTTCCTGCCCAAAGGACTCGGGTTGTCTGACATCGCTGCATGATGCATCTCAGCCCGC
CTAGTGATGGTTCCCCTCCTCACTCTGTGCAGATCATGCCCAGTCACTTCCTCCACTGGATGGAGGAGAA
CCAAGTCAGTGGCTTCCTGCTCAGCCTTCTTGCTTCTCCCTTTAACAGTTCCCCATGGGAAATGGCAAAC
AAGTATAAATAAAGACACCCATTGAGTGACAAAAAAAAAAAAAAAAAAAAAAAAAAAAAA
translation = “MEARVAWGALAGPLRVLCVLCCLLGRAIAAPSPIIKFPGDVAPK
TDKELAVQYLNTFYGCPKESCNLFVLKDTLKKMQKFFGLPQTGDLDQNTIETMRKPRC
GNPDVANYNFFPRKPKWDKNQITYRIIGYTPDLDPETVDDAFARALKVWSDVTPLRFS
RIHDGEADIMINFGRWEHGDGYPFDGKDGLLAHAFAPGTGVGGDSHFDDDELWTLGEG
QVVRVKYGNADGEYCKFPFLFNGREYSSCTDTGRSDGFLWCSTTYNFEKDGKYGFCPH
EALFTMGGNADGQPCKFPFRFQGTSYNSCTTEGRTDGYRWCGTTEDYDRDKKYGFCPE
TAMSTVGGNSEGAPCVFPFTFLGNKYESCTSAGRNDGKVWCATTTNYDDDRKWGFCPD
QGYSLFLVAAHEFGHAMGLEHSQDPGALMAPIYTYTKNFRLSHDDIKGIQELYGPSPD
ADTDTGTGPTPTLGPVTPEICKQDIVFDGIAQIRGEIFFFKDRFIWRTVTPRDKPTGP
LLVATFWPELPEKIDAVYEAPQEEKAVFFAGNEYWVYSASTLERGYPKPLTSLGLPPD
VQQVDAAFNWSKNKKTYIFAGDKFWRYNEVKKKMDPGFPKLIADSWNAIPDNLDAVVD
LQGGGHSYFFKGAYYLKLENQSLKSVKFGSIKSDWLGC”

[0175] Small molecule inhibitors of MMP-2. An MMP-9/MMP-2 binding protein described herein can be used in combination with a small molecule inhibitor. For example, because the inhibitors are used in combination, the dose of the small molecule used can be decreased and/or result in fewer side effects. Examples of small molecule MMP-2 inhibitors include (2-((Isopropoxy)-(1,1′-biphenyl-4-ylsulfonyl)-amino))-N-hydroxyacetamide (Calbiochem, #444288) and N-arylsulfonyl-N-alkoxyaminoacetohydroxamic acid.

[0176] Small interfering RNA inhibitors of MMP-2. MMP-2 can be inhibited by small interfering RNA (siRNA). Examples of siRNA that can be used include:

MMP-2 siRNA
5′-CUUUAGAUAUACAAAGGGAtt-3′
3′-ttGAAAUCUAUAUGUUUCCCU-5′
MMP-2 siRNA2
5′-GGAGAGUUGCAACCUCUUUtt-3′
3′-ttCCUCUCAACGUUGGAGAAA-5′

[0177] See also Kawasaki et al., Feb. 10, 2008, Nat. Med. advance on-line publication doi:10.1038/nm1723. The siRNA can be administered to inhibit MMP-2, e.g., in combination with an MMP-9/MMP-2 binding protein described herein.

### Drug Conjugates

[0178] The MMP-9/MMP-2 binding proteins or MMP-9 binding proteins described herein can be conjugated to a drug (e.g., a cytotoxic, cytostatic, or immunomodulatory agent). The conjugates can be used therapeutically or prophylactically, e.g., the binding protein can target the drug, e.g., in vivo, e.g., to a site of disease (e.g., a tumor or site of inflammation), e.g., such that the drug affects the site of disease (e.g., causes a cytostatic or cytotoxic effect on targeted cells).

[0179] In some embodiments, the binding protein itself has therapeutic or prophylactic efficacy (e.g., the protein can modulate (e.g., antagonize) MMP-9 and/or MMP-2, or cause a cytostatic or cytotoxic effect on a cell that expresses MMP-9 and/or MMP-2 (e.g., an endothelial cell or tumor cell)). The binding protein-drug conjugate can be used such that the binding protein and drug both contribute (e.g., additively or synergistically) to an effect on MMP-9 and/or MMP-2 (e.g., a therapeutic effect, e.g., in vivo, e.g., to a site of disease (e.g., a tumor or site of undesired angiogenesis or vascularization). The drug and/or binding protein can be, for example, cytotoxic, cytostatic or otherwise prevent or reduce the ability of a targeted cell to divide and/or survive (e.g., when the drug is taken up or internalized by the targeted cell and/or upon binding of the binding protein to MMP-9 and/or MMP-2). For example, if the targeted cell is a cancer cell, the drug and/or binding protein can prevent or reduce the ability of the cell to divide and/or metastasize.

[0180] Useful classes of drugs that can be used in the binding protein-drug conjugates described herein include cytotoxic or immunomodulatory agents such as, for example, antitubulin agents, auristatins, DNA minor groove binders, DNA replication inhibitors, alkylating agents (e.g., platinum complexes such as cis-platin, mono(platinum), bis(platinum) and tri-nuclear platinum complexes and carboplatin), anthracyclines, antibiotics, antifolates, antimetabolites, chemotherapy sensitizers, duocarmycins, etoposides, fluorinated pyrimidines, ionophores, lexitropsins, nitrosoureas, platinols, pre-forming compounds, purine antimetabolites, puromycins, radiation sensitizers, steroids, taxanes, topoisomerase inhibitors, vinca alkaloids, or the like.

[0181] Individual cytotoxic or immunomodulatory agents include, for example, an androgen, anthramycin (AMC), asparaginase, 5-azacytidine, azathioprine, bleomycin, busulfan, buthionine sulfoximine, camptothecin, carboplatin, carmustine (BSNU), CC-1065, chlorambucil, cisplatin, colchicine, cyclophosphamide, cytarabine, cytidine arabinoside, cytochalasin B, dacarbazine, dactinomycin (actinomycin), daunorubicin, decarbazine, docetaxel, doxorubicin, an estrogen, 5-fluorodeoxyuridine, 5-fluorouracil, gramicidin D, hydroxyurea, idarubicin, ifosfamide, irinotecan, lomustine (CCNU), mechlorethamine, melphalan, 6-mercaptopurine, methotrexate, mithramycin, mitomycin C, mitoxantrone, nitroimidazole, paclitaxel, plicamycin, procarbazine, rapamycin (Sirolimus), streptozotocin, tenoposide, 6-thioguanine, thioTEPA, topotecan, vinblastine, vincristine, vinorelbine, VP-16 and VM-26.

[0182] In some typical embodiments, the drug comprises a cytotoxic agent. Suitable cytotoxic agents include, for example, dolastatins (e.g., auristatin E, AFP, MMAF, MMAE), DNA minor groove binders (e.g., enediynes and lexitropsins), duocarmycins, taxanes (e.g., paclitaxel and docetaxel), puromycins, vinca alkaloids, CC-1065, SN-38, topotecan, morpholino-doxorubicin, rhizoxin, cyanomorpholino-doxorubicin, echinomycin, combretastatin, netropsin, epothilone A and B, estramustine, cryptophysins, cemadotin, maytansinoids, discodermolide, eleutherobin, and mitoxantrone.

[0183] In some embodiments, the drug is a cytotoxic agent such as AFP, MMAF, MMAE, AEB, AEVB, auristatin E, paclitaxel, docetaxel, CC-1065, SN-38, topotecan, morpholino-doxorubicin, rhizoxin, cyanomorpholino-doxorubicin, dolastatin-10, echinomycin, combretatstatin, chalicheamicin, maytansine, DM-1, or netropsin.

[0184] In some embodiments, the drug is a cytotoxic agent that comprises a conventional chemotherapeutic such as, for example, doxorubicin, paclitaxel, melphalan, vinca alkaloids, methotrexate, mitomycin C or etoposide. In some embodiments, the drug can be a combined therapy, such as CHOP (Cyclophosphamide, Doxorubicin, Prednisolone and Vincristine), CHOP-R (Cyclophosphamide, Doxorubicin Vincristine, Prednisolone, and rituximab) or ABVD (Doxorubicin, Bleomycin, Vinblastine and Dacarbazine). Agents such as CC-1065 analogues (e.g., DC1), calicheamicin, maytansine, analogues of dolastatin 10, rhizoxin, and palytoxin can also be used.

[0185] In specific embodiments, the drug can be a cytotoxic or cytostatic agent that comprises auristatin E (also known in the art as dolastatin-10) or a derivative thereof. Typically, the auristatin E derivative is, e.g., an ester formed between auristatin E and a keto acid. For example, auristatin E can be reacted with paraacetyl benzoic acid or benzoylvaleric acid to produce AEB and AEVB, respectively. Other auristatin derivatives include AFP, MMAF, and MMAE. The synthesis and structure of auristatin E and its derivatives are described in US 20030083263 and US 20050009751, and U.S. Pat. Nos. 6,323,315; 6,239,104; 6,034,065; 5,780,588; 5,665,860; 5,663,149; 5,635,483; 5,599,902; 5,554,725; 5,530,097; 5,521,284; 5,504,191; 5,410,024; 5,138,036; 5,076,973; 4,986,988; 4,978,744; 4,879,278; 4,816,444; and 4,486,414. In some preferred embodiments, MMAF or AFP is used.

[0186] In specific embodiments, the drug is a cytotoxic agent that comprises a DNA minor groove binding agent. See, e.g., U.S. Pat. No. 6,130,237. For example, in some embodiments, the minor groove binding agent is a CBI compound. In other embodiments, the minor groove binding agent is an enediyne (e.g., calicheamicin).

[0187] Examples of anti-tubulin agents that can be used in the MMP-9 and/or MMP-2 binding protein-drug conjugates or MMP-9 binding protein-drug conjugates include, but are not limited to, taxanes (e.g., TAXOL® (paclitaxel), TAXOTERE® (docetaxel)), T67 (Tularik), vinca alkyloids (e.g., vincristine, vinblastine, vindesine, and vinorelbine), and dolastatins (e.g., auristatin E, AFP, MMAF, MMAE, AEB, AEVB). Other antitubulin agents include, for example, baccatin derivatives, taxane analogs (e.g., epothilone A and B), nocodazole, colchicine and colcimid, estramustine, cryptophysins, cemadotin, maytansinoids, combretastatins, discodermolide, eleutherobin, rhizoxin/maytansine, auristatin dolastatin 10 MMAE, and peloruside A.

[0188] In some embodiments, the drug is a cytotoxic agent such as an anti-tubulin agent. In some embodiments, the anti-tubulin agent is an auristatin, a vinca alkaloid, a podophyllotoxin, a taxane, a baccatin derivative, a cryptophysin, a maytansinoid, a combretastatin, or a dolastatin. In some embodiments, the antitubulin agent is AFP, MMAP, MMAE, AEB, AEVB, auristatin E, vincristine, vinblastine, vindesine, vinorelbine, VP-16, camptothecin, paclitaxel, docetaxel, epothilone A, epothilone B, nocodazole, colchicines, colcimid, estramustine, cemadotin, discodermolide, maytansine, DM1, DM2, DM3, DM4, or eleutherobin.

[0189] In some embodiments, the cytotoxic agent comprises a maytansinoid, another group of anti-tubulin agents. For example, in specific embodiments, the maytansinoid is maytansine or DM-1 (ImmunoGen, Inc.; see also Chari et al. Cancer Res. 52:127-131 (1992)). In some embodiments, sterically hindered thiol and disulfide-containing maytansinoids in which the alpha-carbon atom bearing the sulfur atom bears one or two alkyl substituents are used in the binding protein-drug conjugate, e.g., US 2007-0292422; US 2007-0264266.

[0190] In some embodiments, the drug comprises an agent that acts to disrupt DNA. The drug may be selected from enediynes (e.g., calicheamicin and esperamicin) and non-enediyne small molecule agents (e.g., bleomycin, methidiumpropyl-EDTA-Fe(II)). Other useful drugs include daunorubicin, doxorubicin, distamycin A, cisplatin, mitomycin C, ecteinascidins, duocarmycin/CC-1065, and bleomycin/pepleomycin.

[0191] In other embodiments, the drug can comprise an alkylating agent such as Asaley NSC 167780, AZQ NSC 182986, BCNU NSC 409962, Busulfan NSC 750, carboxyphthalatoplatinum NSC 271674, CBDCA NSC 241240, CCNU NSC 79037, CHIP NSC 256927, chlorambucil NSC 3088, chlorozotocin NSC 178248, cis-platinum NSC 119875, clomesone NSC 338947, cyanomorpholinodoxorubicin NSC 357704, cyclodisone NSC 348948, dianhydrogalactitol NSC 132313, fluorodopan NSC 73754, hepsulfam NSC 329680, hycanthone NSC 142982, melphalan NSC 8806, methyl CCNU NSC 95441, mitomycin C NSC 26980, mitozolamide NSC 353451, nitrogen mustard NSC 762, PCNU NSC 95466, piperazine NSC 344007, piperazinedione NSC 135758, pipobroman NSC 25154, porfiromycin NSC 56410, spirohydantoin mustard NSC 172112, teroxirone NSC 296934, tetraplatin NSC 363812, thio-tepa NSC 6396, triethylenemelamine NSC 9706, uracil nitrogen mustard NSC 34462, or Yoshi-864 NSC 102627.

[0192] In some embodiments, the drug can comprise an antimitotic agent such as allocolchicine NSC 406042, Halichondrin B NSC 609395, colchicine NSC 757, colchicine derivative NSC 33410, dolastatin 10 NSC 376128 (NG—auristatin derived), maytansine NSC 153858, rhizoxin NSC 332598, taxol NSC 125973, taxol derivative NSC 608832, thiocolchicine NSC 361792, trityl cysteine NSC 83265, vinblastine sulfate NSC 49842, or vincristine sulfate NSC 67574.

[0193] In other embodiments, the drug can comprise an topoisomerase I inhibitor such as camptothecin NSC 94600, camptothecin, Na salt NSC 100880, aminocamptothecin NSC 603071, camptothecin derivative NSC 95382, camptothecin derivative NSC 107124, camptothecin derivative NSC 643833, camptothecin derivative NSC 629971, camptothecin derivative NSC 295500, camptothecin derivative NSC 249910, camptothecin derivative NSC 606985, camptothecin derivative NSC 374028, camptothecin derivative NSC 176323, camptothecin derivative NSC 295501, camptothecin derivative NSC 606172, camptothecin derivative NSC 606173, camptothecin derivative NSC 610458, camptothecin derivative NSC 618939, camptothecin derivative NSC 610457, camptothecin derivative NSC 610459, camptothecin derivative NSC 606499, camptothecin derivative NSC 610456, camptothecin derivative NSC 364830, camptothecin derivative NSC 606497, or morpholinodoxorubicin NSC 354646.

[0194] In other embodiments, the drug can comprise an topoisomerase II inhibitor such as doxorubicin NSC 123127, amonafide NSC 308847, m-AMSA NSC 249992, anthrapyrazole derivative NSC 355644, pyrazoloacridine NSC 366140, bisantrene HCL NSC 337766, daunorubicin NSC 82151, deoxydoxorubicin NSC 267469, mitoxantrone NSC 301739, menogaril NSC 269148, N,N-dibenzyl daunomycin NSC 268242, oxanthrazole NSC 349174, rubidazone NSC 164011, VM-26 NSC 122819, or VP-16 NSC 141540.

[0195] In other embodiments, the drug can comprise an RNA or DNA antimetabolite such as L-alanosine NSC 153353, 5-azacytidine NSC 102816, 5-fluorouracil NSC 19893, acivicin NSC 163501, aminopterin derivative NSC 132483, aminopterin derivative NSC 184692, aminopterin derivative NSC 134033, an antifol NSC 633713, an antifol NSC 623017, Baker's soluble antifol NSC 139105, dichlorallyl lawsone NSC 126771, brequinar NSC 368390, ftorafur (pro-drug) NSC 148958, 5,6-dihydro-5-azacytidine NSC 264880, methotrexate NSC 740, methotrexate derivative NSC 174121, N-(phosphonoacetyl)-L-aspartate (PALA) NSC 224131, pyrazofurin NSC 143095, trimetrexate NSC 352122, 3-HP NSC 95678, 2′-deoxy-5-fluorouridine NSC 27640, 5-HP NSC 107392, alpha-TGDR NSC 71851, aphidicolin glycinate NSC 303812, ara-C NSC 63878, 5-aza-2′-deoxycytidine NSC 127716, beta-TGDR NSC 71261, cyclocytidine NSC 145668, guanazole NSC 1895, hydroxyurea NSC 32065, inosine glycodialdehyde NSC 118994, macbecin 11 NSC 330500, pyrazoloimidazole NSC 51143, thioguanine NSC 752, or thiopurine NSC 755. See also US 2007-0292441.

[0196] The abbreviation “AFP” refers to dimethylvaline-valine-dolaisoleuine-dolaproine-phenylalanine-p-phenylened-iamine (e.g., see Formula XVI in US 2006-0233794).

[0197] The abbreviation “MAE” refers to monomethyl auristatin E (see Formula XI in US 2006-0233794).

[0198] The abbreviation “AEB” refers to an ester produced by reacting auristatin E with paraacetyl benzoic acid (e.g., see Formula XX in US 2006-0233794)

[0199] The abbreviation “AEVB” refers to an ester produced by reacting auristatin E with benzoylvaleric acid (e.g., see Formula XXI in US 2006-0233794).

[0200] The abbreviation “MMAF” refers to dovaline-valine-dolaisoleunine-dolaproine-phenylalanine (e.g., see Formula IVIV in US 2006-0233794).

[0201] The abbreviations “fk” and “phe-lys” refer to the linker phenylalanine-lysine.

[0202] The abbreviations “vc” and “val-cit” refer to the linker valine-citrulline.

[0203] In some embodiments, the drug is a cytotoxic agent selected from the group consisting of an auristatin, a DNA minor groove binding agent, a DNA minor groove alkylating agent, an enediyne, a lexitropsin, a duocarmycin, a taxane, a puromycin, a dolastatin, a maytansinoid, and a vinca alkaloid.

[0204] In some embodiments, the drug is a cytotoxic agent such as AFP or MMAF.

[0205] In some embodiments, the drug is an immunosuppressive agent such as gancyclovir, etanercept, cyclosporine, tacrolimus, rapamycin, cyclophosphamide, azathioprine, mycophenolate mofetil, methotrexate, cortisol, aldosterone, dexamethasone, a cyclooxygenase inhibitor, a 5-lipoxygenase inhibitor, or a leukotriene receptor antagonist.

[0206] See generally US 2007-0292441; US 2007-0292422; US 2007-0264266; and US 2006-0233794.

### Linkers

[0207] The binding proteins described herein can be associated with a drug to form a binding protein-drug conjugate by being linked to the drug directly. In some embodiments, the binding protein is directly conjugated to the drug. Alternatively, the binding proteins described herein can be associated with a drug to form a binding protein-drug conjugate by use of a linker region between the drug and the binding protein. In some embodiments, the binding protein is conjugated to the drug via a linker. The linker can be cleavable under intracellular conditions, e.g., such that cleavage of the linker releases the drug from the binding protein in the intracellular environment. In some embodiments, the cleavable linker is a peptide linker cleavable by an intracellular protease. In some embodiments, the peptide linker is a dipeptide linker.

[0208] In some embodiments, the dipeptide linker is a val-cit (vc) linker or a phe-lys (fk) linker. In some embodiments, the cleavable linker is hydrolyzable at a pH of less than 5.5. In some embodiments, the hydrolyzable linker is a hydrazone linker. In some embodiments, the cleavable linker is a disulfide linker.

[0209] For example, in some embodiments, the linker is cleavable by a cleaving agent that is present in the intracellular environment (e.g., within a lysosome or endosome or caveolea). The linker can be, e.g., a peptidyl linker that is cleaved by an intracellular peptidase or protease enzyme, including, but not limited to, a lysosomal or endosomal protease. In some embodiments, the peptidyl linker is at least two amino acids long or at least three amino acids long. Cleaving agents can include cathepsins B and D and plasmin, which are known to hydrolyze dipeptide drug derivatives resulting in the release of active drug inside target cells (see, e.g., Dubowchik and Walker Pharm. Therapeutics 83:67-123 (1999)). In some embodiments, peptidyl linkers are cleavable by enzymes that are present in targeted cells (e.g., cancer cells). For example, a peptidyl linker that is cleavable by the thiol-dependent protease cathepsin-B, which is highly expressed in cancerous tissue, can be used (e.g., a Phe-Leu or a Gly-Phe-Leu-Gly linker). Other such linkers are described, e.g., in U.S. Pat. No. 6,214,345. In some embodiments, the peptidyl linker cleavable by an intracellular protease is a Val-Cit (vc) linker or a Phe-Lys linker (fk) (see, e.g., U.S. Pat. No. 6,214,345, which describes the synthesis of doxorubicin with the val-cit linker). One advantage of using intracellular proteolytic release of the drug is that the drug can be attenuated when conjugated and the serum stabilities of the conjugates are typically high.

[0210] In some preferred embodiments, a vc linker is used in the binding protein-drug conjugates described herein. For example, a binding protein-vcAFP or a binding protein-vcMMAF conjugate (e.g., an MMP-9/MMP-2 binding protein-vcAFP, an MMP-9/MMP-2 binding protein-vcMMAF, an MMP-9 binding protein-vcAFP, or an MMP-9 binding protein-vcMMAF conjugate) is prepared.

[0211] In other embodiments, the cleavable linker is pH-sensitive, i.e., sensitive to hydrolysis at certain pH values. For example, the pH-sensitive linker is hydrolyzable under acidic conditions. For example, an acid-labile linker that is hydrolyzable in the lysosome (e.g., a hydrazone, semicarbazone, thiosemicarbazone, cis-aconitic amide, orthoester, acetal., ketal., or the like) can be used. See, e.g., U.S. Pat. Nos. 5,122,368; 5,824,805; 5,622,929; Dubowchik and Walker Pharm. Therapeutics 83:67-123 (1999); Neville et al. Biol. Chem. 264:14653-14661 (1989). Such linkers are relatively stable under neutral pH conditions, such as those in the blood, but are unstable at below pH 5.5 or 5.0, the approximate pH of the lysosome. In certain embodiments, the hydrolyzable linker is a thioether linker (such as, e.g., a thioether attached to the therapeutic agent via an acylhydrazone bond (see, e.g., U.S. Pat. No. 5,622,929)).

[0212] In yet other embodiments, the linker is cleavable under reducing conditions (e.g., a disulfide linker). A variety of disulfide linkers are known in the art, including, for example, those that can be formed using SATA (N-succinimidyl-5-acetylthioacetate), SPDP (N-succinimidyl-3-(2-pyridyldithio)propionate), SPDB (N-succinimidyl-3-(2-pyridyldithio)butyrate) and SMPT (N-succinimidyl-oxycarbonyl-alpha-methyl-alpha-(2-pyridyl-dithio)toluene)-, SPDB and SMPT (See, e.g., Thorpe et al. Cancer Res. 47:5924-5931 (1987); Wawrzynczak et al., In Immunoconjugates: Antibody Conjugates in Radioimagery and Therapy of Cancer (C. W. Vogel ed., Oxford U. Press, 1987). See also U.S. Pat. No. 4,880,935.

[0213] In yet other embodiments, the linker is a malonate linker (Johnson et al. Anticancer Res. 15:1387-93 (1995)), a maleimidobenzoyl linker (Lau et al. Bioorg-Med-Chem. 3(10):1299-1304 (1995), or a 3′-N-amide analog (Lau et al. Bioorg-Med-Chem. 3(10):1305-12 (1995)).

[0214] In some embodiments, the linker is not substantially sensitive to the extracellular environment. As used herein, “not substantially sensitive to the extracellular environment,” in the context of a linker, means that no more than about 20%, typically no more than about 15%, more typically no more than about 10%, and even more typically no more than about 5%, no more than about 3%, or no more than about 1% of the linkers, in a sample of a binding protein-drug conjugate, are cleaved when the binding protein-drug conjugate is present in an extracellular environment (e.g., in plasma). Whether a linker is not substantially sensitive to the extracellular environment can be determined, for example, by incubating independently with plasma both (a) the binding protein-drug conjugate (the “conjugate sample”) and (b) an equal molar amount of unconjugated binding protein or drug (the “control sample”) for a predetermined time period (e.g., 2, 4, 8, 16, or 24 hours) and then comparing the amount of unconjugated binding protein or drug present in the conjugate sample with that present in control sample, as measured, for example, by high performance liquid chromatography.

[0215] In other, non-mutually exclusive embodiments, the linker promotes cellular internalization. In certain embodiments, the linker promotes cellular internalization when conjugated to the drug (i.e., in the milieu of the linker-drug moiety of the binding protein-drug conjugate described herein). In yet other embodiments, the linker promotes cellular internalization when conjugated to both the drug and the binding protein.

[0216] A variety of linkers that can be used with the present compositions and methods are described in WO 2004010957.

[0217] In some embodiments, the binding protein-drug conjugates described herein are used therapeutically in the treatment of a disorder (e.g., cancer or inflammation). In certain embodiments, it is desirable to only target a binding protein-drug conjugate to a cell that expresses the target to which the binding protein binds (e.g., to only target an MMP-9 and/or MMP-2 expressing cell to which an MMP-9/MMP-2 binding protein binds, and not target a nearby “bystander” cell; or to only target an MMP-9 expressing cell to which an MMP-9 binding protein binds, and not target a nearby “bystander” cell), e.g., to minimize toxicity. In other embodiments, it is desirable to target a binding protein-drug conjugate to a cell expressing the target to which the binding protein binds and also to bystander cells (e.g., to elicit a “bystander effect”). In some embodiments, a binding protein-drug conjugate (e.g., an MMP-9/MMP-2 binding protein-drug conjugate or an MMP-9 binding protein-drug conjugate can be engineered to exert a precise killing of only antigen-presenting cells without damaging proximal antigen-negative tissues, e.g., by preparing thioether-linked conjugates. Alternatively, it can be engineered to produce a bystander effect, e.g., by preparing disulfide-linked conjugates.

[0218] For example, many solid tumors express targets (e.g., antigens) in a heterogeneous fashion and are populated with both target-positive and target-negative cells. The bystander cytotoxicity associated with disulfide linker-containing conjugates provides a rationale for treatment of sites of a disorder (e.g., tumors) with binding protein-drug conjugates even if the sites exhibit heterogeneous target expression. The bystander effect adds a degree of nonselective killing activity. Potentially, this could be a drawback if normal cells in tissues surrounding the site of disorder (e.g., tumor) are affected. However, as a potential advantage, the bystander cytotoxicity may damage tissues intricately involved in supporting the disorder, such as endothelial cells and pericytes of tumor neovasculature, or tumor stromal cells, resulting, for example, in enhanced antitumor activity of the binding protein-drug conjugate against tumors expressing the antigen either homogeneously or heterogeneously. See also Kovtum et al. Cancer Res. 66:3214 (2006).

[0219] Techniques for conjugating therapeutic agents to proteins (such as binding proteins, e.g., MMP-9/MMP-2 binding proteins and MMP-9 binding proteins) are known. See, e.g., Arnon et al., “Monoclonal Antibodies For Immunotargeting Of Drugs In Cancer Therapy,” in Monoclonal Antibodies And Cancer Therapy (Reisfeld et al eds., Alan R. Liss, Inc., 1985); Hellstrom et al., “Antibodies For Drug Delivery,” in Controlled Drug Delivery (Robinson et al. eds., Marcel Deiker, Inc., 2nd ed. 1987); Thorpe, “Antibody Carriers Of Cytotoxic Agents In Cancer Therapy: A Review,” in Monoclonal Antibodies '84: Biological And Clinical Applications (Pinchera et al. eds., 1985); “Analysis, Results, and Future Prospective of the Therapeutic Use of Radiolabeled Antibody In Cancer Therapy,” in Monoclonal Antibodies For Cancer Detection And Therapy (Baldwin et al. eds., Academic Press, 1985); and Thorpe et al. Immunol. Rev. 62:119-58 (1982). See also, e.g., US 2006-0233794 and PCT publication WO 89/12624.

### Display Libraries

[0220] The antibodies described herein can be used to identify other antibodies with similar biological activity.

[0221] In one embodiment, using antibodies (e.g., Fabs, scFvs, IgG, or IgM) displayed on genetic packages (such as phage, yeast, E. coli, or ribosomes), antibodies that bind to MMP-9 and/or MMP-2 in the presence of one of the antibodies described herein can be depleted, and then antibodies that bind to the free protease can be selected. This procedure can have many variations. For example, depletion can be used only in the second and subsequent rounds, or MMP-9 (or MMP-2) can be immobilized and soluble MMP-9-antibody complexes can be introduced in the solution as decoy for antibodies that bind to sites other than the binding site of the antibodies described herein.

[0222] In one embodiment, using antibodies that come from mice, the antibodies described herein can be used as a screening tool. For example, antibodies that bind the protease in the absence of an antibody described herein but that are blocked by an antibody described herein can then be tested for inhibitory activity.

[0223] In one embodiment, the antibodies described herein can be used to select or screen antibodies that share the bispecific binding e.g., binding to human MMP-9 and human MMP-2 with high affinity and specificity. In another embodiment, the antibodies described herein can be used to select or screeen antibodies that are specific to human MMP-9, human MMP-2, mouse MMP-9, and/or mouse MMP-2.

[0224] A display library is a collection of entities; each entity includes an accessible polypeptide component and a recoverable component that encodes or identifies the polypeptide component. The polypeptide component is varied so that different amino acid sequences are represented. The polypeptide component can be of any length, e.g. from three amino acids to over 300 amino acids. A display library entity can include more than one polypeptide component, for example, the two polypeptide chains of a sFab. In one exemplary implementation, a display library can be used to identify proteins that bind to MMP-9. In a selection, the polypeptide component of each member of the library is probed with MMP-9 (e.g., the catalytic domain of MMP-9 or other fragment) and if the polypeptide component binds to the MMP-9, the display library member is identified, typically by retention on a support.

[0225] Retained display library members are recovered from the support and analyzed. The analysis can include amplification and a subsequent selection under similar or dissimilar conditions. For example, positive and negative selections can be alternated. The analysis can also include determining the amino acid sequence of the polypeptide component and purification of the polypeptide component for detailed characterization.

[0226] The retained family members are subjected to a subsequent analysis to recover binding proteins that also bind to MMP-2 or does not bind to MMP-2.

[0227] A variety of formats can be used for display libraries. Examples include the following.

[0228] Phage Display: The protein component is typically covalently linked to a bacteriophage coat protein. The linkage results from translation of a nucleic acid encoding the protein component fused to the coat protein. The linkage can include a flexible peptide linker, a protease site, or an amino acid incorporated as a result of suppression of a stop codon. Phage display is described, for example, in U.S. Pat. No. 5,223,409; Smith (1985) Science 228:1315-1317; WO 92/18619; WO 91/17271; WO 92/20791; WO 92/15679; WO 93/01288; WO 92/01047; WO 92/09690; WO 90/02809; de Haard et al. (1999) J. Biol. Chem. 274:18218-30; Hoogenboom et al. (1998) Immunotechnology 4:1-20; Hoogenboom et al. (2000) Immunol Today 2:371-8 and Hoet et al. (2005) Nat. Biotechnol. 23(3)344-8. Bacteriophage displaying the protein component can be grown and harvested using standard phage preparatory methods, e.g. PEG precipitation from growth media. After selection of individual display phages, the nucleic acid encoding the selected protein components can be isolated from cells infected with the selected phages or from the phage themselves, after amplification. Individual colonies or plaques can be picked, the nucleic acid isolated and sequenced.

[0229] Other Display Formats. Other display formats include cell based display (see, e.g., WO 03/029456), protein-nucleic acid fusions (see, e.g., U.S. Pat. No. 6,207,446), ribosome display (See, e.g., Mattheakis et al. (1994) Proc. Natl. Acad. Sci. USA 91:9022 and Hanes et al. (2000) Nat Biotechnol. 18:1287-92; Hanes et al. (2000) Methods Enzymol. 328:404-30; and Schaffitzel et al. (1999) J Immunol Methods. 231(1-2):119-35), and E. coli periplasmic display (J Immunol Methods. 2005 Nov. 22; PMID: 16337958).

[0230] Scaffolds. Scaffolds useful for display include: antibodies (e.g., Fab fragments, single chain Fv molecules (scFV), single domain antibodies, camelid antibodies, and camelized antibodies); T-cell receptors; MHC proteins; extracellular domains (e.g., fibronectin Type III repeats, EGF repeats); protease inhibitors; TPR repeats; trifoil structures; zinc finger domains; DNA-binding proteins; particularly monomeric DNA binding proteins; RNA binding proteins; enzymes, e.g., proteases (particularly inactivated proteases), RNase; chaperones, e.g., thioredoxin and heat shock proteins; intracellular signaling domains (such as SH2 and SH3 domains); linear and constrained peptides; and linear peptide substrates. Display libraries can include synthetic and/or natural diversity. See, e.g., US 2004-0005709.

[0231] Display technology can also be used to obtain binding proteins (e.g., antibodies) that bind particular epitopes of a target. This can be done, for example, by using competing non-target molecules that lack the particular epitope or are mutated within the epitope, e.g., with alanine. Such non-target molecules can be used in a negative selection procedure as described below, as competing molecules when binding a display library to the target, or as a pre-elution agent, e.g., to capture in a wash solution dissociating display library members that are not specific to the target.

[0232] Iterative Selection. In one preferred embodiment, display library technology is used in an iterative mode. A first display library is used to identify one or more binding proteins for a target. These identified binding proteins are then varied using a mutagenesis method to form a second display library. Higher affinity binding proteins are then selected from the second library, e.g., by using higher stringency or more competitive binding and washing conditions.

[0233] In some implementations, the mutagenesis is targeted to regions at the binding interface. If, for example, the identified binding proteins are antibodies, then mutagenesis can be directed to the CDR regions of the heavy or light chains as described herein. Further, mutagenesis can be directed to framework regions near or adjacent to the CDRs. In the case of antibodies, mutagenesis can also be limited to one or a few of the CDRs, e.g., to make precise step-wise improvements. Exemplary mutagenesis techniques include: error-prone PCR, recombination, DNA shuffling, site-directed mutagenesis and cassette mutagenesis.

[0234] In one example of iterative selection, the methods described herein are used to first identify a protein from a display library that binds MMP-9 with at least a minimal binding specificity for a target or a minimal activity, e.g., an equilibrium dissociation constant for binding of less than 1 nM, 10 nM, or 100 nM. The nucleic acid sequence encoding the initially identified proteins are used as a template nucleic acid for the introduction of variations, e.g., to identify a second protein that has enhanced properties (e.g., binding affinity, kinetics, or stability) relative to the initial protein. The methods also include identifying a protein from a display library that binds MMP-2 with at least a minimal binding specificity for a target or a minimal activity, e.g., an equilibrium dissociation constant for binding of less than 1 nM, 10 nM, or 100 nM.

[0235] Off-Rate Selection. Since a slow dissociation rate can be predictive of high affinity, particularly with respect to interactions between polypeptides and their targets, the methods described herein can be used to isolate binding proteins with a desired (e.g., reduced) kinetic dissociation rate for a binding interaction to a target.

[0236] To select for slow dissociating binding proteins from a display library, the library is contacted to an immobilized target. The immobilized target is then washed with a first solution that removes non-specifically or weakly bound biomolecules. Then the bound binding proteins are eluted with a second solution that includes a saturating amount of free target or a target specific high-affinity competing monoclonal antibody, i.e., replicates of the target that are not attached to the particle. The free target binds to biomolecules that dissociate from the target. Rebinding is effectively prevented by the saturating amount of free target relative to the much lower concentration of immobilized target.

[0237] The second solution can have solution conditions that are substantially physiological or that are stringent. Typically, the solution conditions of the second solution are identical to the solution conditions of the first solution. Fractions of the second solution are collected in temporal order to distinguish early from late fractions. Later fractions include biomolecules that dissociate at a slower rate from the target than biomolecules in the early fractions.

[0238] Further, it is also possible to recover display library members that remain bound to the target even after extended incubation. These can either be dissociated using chaotropic conditions or can be amplified while attached to the target. For example, phage bound to the target can be contacted to bacterial cells.

[0239] Selecting or Screening for Specificity. The display library screening methods described herein can include a selection or screening process that discards display library members that bind to a non-target molecule. Examples of non-target molecules include streptavidin on magnetic beads, blocking agents such as bovine serum albumin, non-fat bovine milk, any capturing or target immobilizing monoclonal antibody, or non-transfected cells which do not express the human MMP-9 target.

[0240] In one implementation, a so-called “negative selection” step is used to discriminate between the target and related non-target molecule and a related, but distinct non-target molecules. The display library or a pool thereof is contacted to the non-target molecule. Members of the sample that do not bind the non-target are collected and used in subsequent selections for binding to the target molecule or even for subsequent negative selections. The negative selection step can be prior to or after selecting library members that bind to the target molecule.

[0241] In another implementation, a screening step is used. After display library members are isolated for binding to the target molecule, each isolated library member is tested for its ability to bind to a non-target molecule (e.g., a non-target listed above). For example, a high-throughput ELISA screen can be used to obtain this data. The ELISA screen can also be used to obtain quantitative data for binding of each library member to the target as well as for cross species reactivity to related targets or subunits of the target (e.g., mouse MMP-9) and also under different condition such as pH6 or pH 7.5. The non-target and target binding data are compared (e.g., using a computer and software) to identify library members that specifically bind to the target.

### Other Exemplary Expression Libraries

[0242] Other types of collections of proteins (e.g., expression libraries) can be used to identify proteins with a particular property (e.g., ability to bind MMP-9 or MMP-2 and/or ability to modulate MMP-9 or MMP-2), including, e.g., protein arrays of antibodies (see, e.g., De Wildt et al. (2000) Nat. Biotechnol. 18:989-994), lambda gt11 libraries, two-hybrid libraries and so forth.

### Exemplary Libraries

[0243] It is possible to immunize a non-human primate and recover primate antibody genes that can be displayed on phage (see below). From such a library, one can select antibodies that bind the antigen used in immunization. See, for example, Vaccine. (2003) 22(2):257-67 or Immunogenetics. (2005) 57(10):730-8. Thus one could obtain primate antibodies that bind and inhibit MMP-9 (or MMP-2) by immunizing a chimpanzee or macaque and using a variety of means to select or screen for primate antibodies that bind and inhibit MMP-9 (or MMP-2). One can also make chimeras of primatized Fabs with human constant regions, see Curr Opin Mol Ther. (2004) 6(6):675-83. “PRIMATIZED antibodies, genetically engineered from cynomolgus macaque monkey and human components, are structurally indistinguishable from human antibodies. They may, therefore, be less likely to cause adverse reactions in humans, making them potentially suited for long-term, chronic treatment” Curr Opin Investig Drugs. (2001) 2(5):635-8.

[0244] One exemplary type of library presents a diverse pool of polypeptides, each of which includes an immunoglobulin domain, e.g., an immunoglobulin variable domain. Of interest are display libraries where the members of the library include primate or “primatized” (e.g., such as human, non-human primate or “humanized”) immunoglobin domains (e.g., immunoglobin variable domains) or chimeric primatized Fabs with human constant regions. Human or humanized immunoglobin domain libraries may be used to identify human or “humanized” antibodies that, for example, recognize human antigens. Because the constant and framework regions of the antibody are human, these antibodies may avoid themselves being recognized and targeted as antigens when administered to humans. The constant regions may also be optimized to recruit effector functions of the human immune system. The in vitro display selection process surmounts the inability of a normal human immune system to generate antibodies against self-antigens.

[0245] A typical antibody display library displays a polypeptide that includes a VH domain and a VL domain. An “immunoglobulin domain” refers to a domain from the variable or constant domain of immunoglobulin molecules. Immunoglobulin domains typically contain two β-sheets formed of about seven β-strands, and a conserved disulphide bond (see, e.g., A. F. Williams and A. N. Barclay, 1988, Ann. Rev. Immunol. 6:381-405). The display library can display the antibody as a Fab fragment (e.g., using two polypeptide chains) or a single chain Fv (e.g., using a single polypeptide chain). Other formats can also be used.

[0246] As in the case of the Fab and other formats, the displayed antibody can include one or more constant regions as part of a light and/or heavy chain. In one embodiment, each chain includes one constant region, e.g., as in the case of a Fab. In other embodiments, additional constant regions are displayed.

[0247] Antibody libraries can be constructed by a number of processes (see, e.g., de Haard et al., 1999, J. Biol. Chem. 274:18218-30; Hoogenboom et al., 1998, Immunotechnology 4:1-20; Hoogenboom et al., 2000, Immunol. Today 21:371-378, and Hoet et al. (2005) Nat. Biotechnol. 23(3)344-8. Further, elements of each process can be combined with those of other processes. The processes can be used such that variation is introduced into a single immunoglobulin domain (e.g., VH or VL) or into multiple immunoglobulin domains (e.g., VH and VL). The variation can be introduced into an immunoglobulin variable domain, e.g., in the region of one or more of CDR1, CDR2, CDR3, FR1, FR2, FR3, and FR4, referring to such regions of either and both of heavy and light chain variable domains. The variation(s) may be introduced into all three CDRs of a given variable domain, or into CDR1 and CDR2, e.g., of a heavy chain variable domain. Any combination is feasible. In one process, antibody libraries are constructed by inserting diverse oligonucleotides that encode CDRs into the corresponding regions of the nucleic acid. The oligonucleotides can be synthesized using monomeric nucleotides or trinucleotides. For example, Knappik et al., 2000, J. Mol. Biol. 296:57-86 describe a method for constructing CDR encoding oligonucleotides using trinucleotide synthesis and a template with engineered restriction sites for accepting the oligonucleotides.

[0248] In another process, an animal, e.g., a rodent, is immunized with MMP-9 (or MMP-2). The animal is optionally boosted with the antigen to further stimulate the response. Then spleen cells are isolated from the animal, and nucleic acid encoding VH and/or VL domains is amplified and cloned for expression in the display library.

[0249] In yet another process, antibody libraries are constructed from nucleic acid amplified from naïve germline immunoglobulin genes. The amplified nucleic acid includes nucleic acid encoding the VH and/or VL domain. Sources of immunoglobulin-encoding nucleic acids are described below. Amplification can include PCR, e.g., with primers that anneal to the conserved constant region, or another amplification method.

[0250] Nucleic acid encoding immunoglobulin domains can be obtained from the immune cells of, e.g., a primate (e.g., a human), mouse, rabbit, camel, or rodent. In one example, the cells are selected for a particular property. B cells at various stages of maturity can be selected. In another example, the B cells are naïve.

[0251] In one embodiment, fluorescent-activated cell sorting (FACS) is used to sort B cells that express surface-bound IgM, IgD, or IgG molecules. Further, B cells expressing different isotypes of IgG can be isolated. In another preferred embodiment, the B or T cell is cultured in vitro. The cells can be stimulated in vitro, e.g., by culturing with feeder cells or by adding mitogens or other modulatory reagents, such as antibodies to CD40, CD40 ligand or CD20, phorbol myristate acetate, bacterial lipopolysaccharide, concanavalin A, phytohemagglutinin, or pokeweed mitogen.

[0252] In another embodiment, the cells are isolated from a subject that has a disease of condition described herein, e.g., a cancer (e.g., metastatic cancer, e.g., metastatic breast cancer), an inflammatory disease (e.g., synovitis, atherosclerosis), rheumatoid arthritis, osteoarthritis, an ocular condition (e.g., macular degeneration), diabetes, Alzheimer's Disease, cerebral ischemia, endometriosis, fibrin-invasive activity, angiogenesis, or capillary tube formation In another embodiment, the cells are isolated from a transgenic non-human animal that includes a human immunoglobulin locus.

[0253] In one preferred embodiment, the cells have activated a program of somatic hypermutation. Cells can be stimulated to undergo somatic mutagenesis of immunoglobulin genes, for example, by treatment with anti-immunoglobulin, anti-CD40, and anti-CD38 antibodies (see, e.g., Bergthorsdottir et al., 2001, J. Immunol. 166:2228). In another embodiment, the cells are naïve.

[0254] The nucleic acid encoding an immunoglobulin variable domain can be isolated from a natural repertoire by the following exemplary method. First, RNA is isolated from the immune cell. Full length (i.e., capped) mRNAs are separated (e.g. by degrading uncapped RNAs with calf intestinal phosphatase). The cap is then removed with tobacco acid pyrophosphatase and reverse transcription is used to produce the cDNAs.

[0255] The reverse transcription of the first (antisense) strand can be done in any manner with any suitable primer. See, e.g., de Haard et al., 1999, J. Biol. Chem. 274:18218-30. The primer binding region can be constant among different immunoglobulins, e.g., in order to reverse transcribe different isotypes of immunoglobulin. The primer binding region can also be specific to a particular isotype of immunoglobulin. Typically, the primer is specific for a region that is 3′ to a sequence encoding at least one CDR. In another embodiment, poly-dT primers may be used (and may be preferred for the heavy-chain genes).

[0256] A synthetic sequence can be ligated to the 3′ end of the reverse transcribed strand. The synthetic sequence can be used as a primer binding site for binding of the forward primer during PCR amplification after reverse transcription. The use of the synthetic sequence can obviate the need to use a pool of different forward primers to fully capture the available diversity.

[0257] The variable domain-encoding gene is then amplified, e.g., using one or more rounds. If multiple rounds are used, nested primers can be used for increased fidelity. The amplified nucleic acid is then cloned into a display library vector.

### Secondary Screening Methods

[0258] After selecting candidate library members that bind to a target, each candidate library member can be further analyzed, e.g., to further characterize its binding properties for the target, e.g., MMP-9, or for binding to other protein, e.g., MMP-2. Each candidate library member can be subjected to one or more secondary screening assays. The assay can be for a binding property, a catalytic property, an inhibitory property, a physiological property (e.g., cytotoxicity, renal clearance, immunogenicity), a structural property (e.g., stability, conformation, oligomerization state) or another functional property. The same assay can be used repeatedly, but with varying conditions, e.g., to determine pH, ionic, or thermal sensitivities.

[0259] As appropriate, the assays can use a display library member directly, a recombinant polypeptide produced from the nucleic acid encoding the selected polypeptide, or a synthetic peptide synthesized based on the sequence of the selected polypeptide. In the case of selected Fabs, the Fabs can be evaluated or can be modified and produced as intact IgG proteins. Exemplary assays for binding properties include the following.

[0260] ELISA. Binding proteins can be evaluated using an ELISA assay. For example, each protein is contacted to a microtitre plate whose bottom surface has been coated with the target, e.g., a limiting amount of the target. The plate is washed with buffer to remove non-specifically bound polypeptides. Then the amount of the binding protein bound to the target on the plate is determined by probing the plate with an antibody that can recognize the binding protein, e.g., a tag or constant portion of the binding protein. The antibody is linked to a detection system (e.g., an enzyme such as alkaline phosphatase or horse radish peroxidase (HRP) which produces a colorimetric product when appropriate substrates are provided).

[0261] Homogeneous Binding Assays. The ability of a binding protein described herein to bind a target can be analyzed using a homogenous assay, i.e., after all components of the assay are added, additional fluid manipulations are not required. For example, fluorescence resonance energy transfer (FRET) can be used as a homogenous assay (see, for example, Lakowicz et al., U.S. Pat. No. 5,631,169; Stavrianopoulos, et al., U.S. Pat. No. 4,868,103). A fluorophore label on the first molecule (e.g., the molecule identified in the fraction) is selected such that its emitted fluorescent energy can be absorbed by a fluorescent label on a second molecule (e.g., the target) if the second molecule is in proximity to the first molecule. The fluorescent label on the second molecule fluoresces when it absorbs to the transferred energy. Since the efficiency of energy transfer between the labels is related to the distance separating the molecules, the spatial relationship between the molecules can be assessed. In a situation in which binding occurs between the molecules, the fluorescent emission of the ‘acceptor’ molecule label in the assay should be maximal. A binding event that is configured for monitoring by FRET can be conveniently measured through standard fluorometric detection means, e.g., using a fluorimeter. By titrating the amount of the first or second binding molecule, a binding curve can be generated to estimate the equilibrium binding constant.

[0262] Another example of a homogenous assay is ALPHASCREEN™ (Packard Bioscience, Meriden Conn.). ALPHASCREEN™ uses two labeled beads. One bead generates singlet oxygen when excited by a laser. The other bead generates a light signal when singlet oxygen diffuses from the first bead and collides with it. The signal is only generated when the two beads are in proximity. One bead can be attached to the display library member, the other to the target. Signals are measured to determine the extent of binding.

[0263] Surface Plasmon Resonance (SPR). The interaction of binding protein and a target can be analyzed using SPR. SPR or Biomolecular Interaction Analysis (BIA) detects biospecific interactions in real time, without labeling any of the interactants. Changes in the mass at the binding surface (indicative of a binding event) of the BIA chip result in alterations of the refractive index of light near the surface (the optical phenomenon of surface plasmon resonance (SPR)). The changes in the refractivity generate a detectable signal, which are measured as an indication of real-time reactions between biological molecules. Methods for using SPR are described, for example, in U.S. Pat. No. 5,641,640; Raether, 1988, Surface Plasmons Springer Verlag; Sjolander and Urbaniczky, 1991, Anal. Chem. 63:2338-2345; Szabo et al., 1995, Curr. Opin. Struct. Biol. 5:699-705 and on-line resources provide by BIAcore International AB (Uppsala, Sweden). BIAcore Flexchip can be used to compare and rank interactions in real time, in terms of kinetics, affinity or specificity without the use of labels.

[0264] Information from SPR can be used to provide an accurate and quantitative measure of the equilibrium dissociation constant (K_{d}), and kinetic parameters, including Kₒₙ and K_{off}, for the binding of a binding protein to a target. Such data can be used to compare different biomolecules. For example, selected proteins from an expression library can be compared to identify proteins that have high affinity for the target or that have a slow K_{off}. This information can also be used to develop structure-activity relationships (SAR). For example, the kinetic and equilibrium binding parameters of matured versions of a parent protein can be compared to the parameters of the parent protein. Variant amino acids at given positions can be identified that correlate with particular binding parameters, e.g., high affinity and slow K_{off}. This information can be combined with structural modeling (e.g., using homology modeling, energy minimization, or structure determination by x-ray crystallography or NMR). As a result, an understanding of the physical interaction between the protein and its target can be formulated and used to guide other design processes.

[0265] Cellular Assays. Binding proteins can be screened for ability to bind to cells which transiently or stably express and display the target of interest on the cell surface. For example, MMP-9/MMP-2 binding proteins can be fluorescently labeled and binding to MMP-9 or MMP-2 in the presence of absence of antagonistic antibody can be detected by a change in fluorescence intensity using flow cytometry e.g., a FACS machine.

### Other Exemplary Methods for Obtaining MMP-9/MMP-2 and MMP-9 Binding Antibodies

[0266] In addition to the use of display libraries, other methods can be used to obtain an MMP-9/MMP-2 binding antibody or MMP-9 binding antibody. For example, MMP-9 protein, MMP-2 protein or a region from either can be used as an antigen in a non-human animal, e.g., a rodent.

[0267] In one embodiment, the non-human animal includes at least a part of a human immunoglobulin gene. For example, it is possible to engineer mouse strains deficient in mouse antibody production with large fragments of the human Ig loci. Using the hybridoma technology, antigen-specific monoclonal antibodies (Mabs) derived from the genes with the desired specificity may be produced and selected. See, e.g., XENOMOUSE™, Green et al., 1994, Nat. Gen. 7:13-21; U.S. 2003-0070185, WO 96/34096, published Oct. 31, 1996, and PCT Application No. PCT/US96/05928, filed Apr. 29, 1996. Screening human antibodies from XENOMOUSEs to find a bispecific Ab is possible, knowing that an antibody that can bind both human MMP-9 and human MMP-2 exists might motivate such undertakings.

[0268] In another embodiment, a monoclonal antibody is obtained from the non-human animal, and then modified, e.g., humanized or deimmunized. Winter describes a CDR-grafting method that may be used to prepare the humanized antibodies (UK Patent Application GB 2188638A, filed on Mar. 26, 1987; U.S. Pat. No. 5,225,539. All of the CDRs of a particular human antibody may be replaced with at least a portion of a non-human CDR or only some of the CDRs may be replaced with non-human CDRs. It is only necessary to replace the number of CDRs required for binding of the humanized antibody to a predetermined antigen.

[0269] Humanized antibodies can be generated by replacing sequences of the Fv variable region that are not directly involved in antigen binding with equivalent sequences from human Fv variable regions. General methods for generating humanized antibodies are provided by Morrison, S. L., 1985, Science 229:1202-1207, by Oi et al., 1986, BioTechniques 4:214, and by Queen et al. U.S. Pat. No. 5,585,089, U.S. Pat. No. 5,693,761 and U.S. Pat. No. 5,693,762. Those methods include isolating, manipulating, and expressing the nucleic acid sequences that encode all or part of immunoglobulin Fv variable regions from at least one of a heavy or light chain. Numerous sources of such nucleic acid are available. For example, nucleic acids may be obtained from a hybridoma producing an antibody against a predetermined target, as described above. The recombinant DNA encoding the humanized antibody, or fragment thereof, can then be cloned into an appropriate expression vector.

### Reducing Immunogenicity of MMP-9/MMP-2 and MMP-9 Binding Proteins

[0270] Immunoglobulin MMP-9/MMP-2 binding proteins (e.g., IgG or Fab MMP-9/MMP-2 binding proteins) and immunoglobulin MMP-9 binding proteins (e.g., IgG or Fab MMP-9 binding proteins) may be modified to reduce immunogenicity. Reduced immunogenicity is desirable in MMP-9/MMP-2 binding proteins or MMP-9 binding proteins intended for use as therapeutics, as it reduces the chance that the subject will develop an immune response against the therapeutic molecule. Techniques useful for reducing immunogenicity of MMP-9/MMP-2 binding proteins or MMP-9 binding proteins include deletion/modification of potential human T cell epitopes and ‘germlining’ of sequences outside of the CDRs (e.g., framework and Fc).

[0271] An MMP-9/MMP-2 binding antibody or MMP-9 binding antibody may be modified by specific deletion of human T cell epitopes or “deimmunization” by the methods disclosed in WO 98/52976 and WO 00/34317. Briefly, the heavy and light chain variable regions of an antibody are analyzed for peptides that bind to MHC Class II; these peptides represent potential T-cell epitopes (as defined in WO 98/52976 and WO 00/34317). For detection of potential T-cell epitopes, a computer modeling approach termed “peptide threading” can be applied, and in addition a database of human MHC class II binding peptides can be searched for motifs present in the VH and VL sequences, as described in WO 98/52976 and WO 00/34317. These motifs bind to any of the 18 major MHC class II DR allotypes, and thus constitute potential T cell epitopes. Potential T-cell epitopes detected can be eliminated by substituting small numbers of amino acid residues in the variable regions, or preferably, by single amino acid substitutions. As far as possible conservative substitutions are made, often but not exclusively, an amino acid common at this position in human germline antibody sequences may be used. Human germline sequences are disclosed in Tomlinson, I. A. et al., 1992, J. Mol. Biol. 227:776-798; Cook, G. P. et al., 1995, Immunol. Today Vol. 16 (5): 237-242; Chothia, D. et al., 1992, J. Mol. Bio. 227:799-817. The V BASE directory provides a comprehensive directory of human immunoglobulin variable region sequences (compiled by Tomlinson, I. A. et al. MRC Centre for Protein Engineering, Cambridge, UK). After the deimmunizing changes are identified, nucleic acids encoding V_{H} and V_{L} can be constructed by mutagenesis or other synthetic methods (e.g., de novo synthesis, cassette replacement, and so forth). Mutagenized variable sequence can, optionally, be fused to a human constant region, e.g., human IgG1 or κ constant regions.

[0272] In some cases a potential T cell epitope will include residues which are known or predicted to be important for antibody function. For example, potential T cell epitopes are usually biased towards the CDRs. In addition, potential T cell epitopes can occur in framework residues important for antibody structure and binding. Changes to eliminate these potential epitopes will in some cases require more scrutiny, e.g., by making and testing chains with and without the change. Where possible, potential T cell epitopes that overlap the CDRs were eliminated by substitutions outside the CDRs. In some cases, an alteration within a CDR is the only option, and thus variants with and without this substitution should be tested. In other cases, the substitution required to remove a potential T cell epitope is at a residue position within the framework that might be critical for antibody binding. In these cases, variants with and without this substitution should be tested. Thus, in some cases several variant deimmunized heavy and light chain variable regions were designed and various heavy/light chain combinations tested in order to identify the optimal deimmunized antibody. The choice of the final deimmunized antibody can then be made by considering the binding affinity of the different variants in conjunction with the extent of deimmunization, i.e., the number of potential T cell epitopes remaining in the variable region. Deimmunization can be used to modify any antibody, e.g., an antibody that includes a non-human sequence, e.g., a synthetic antibody, a murine antibody other non-human monoclonal antibody, or an antibody isolated from a display library.

[0273] MMP-9/MMP-2 binding antibodies and MMP-9 binding antibodies are “germlined” by reverting one or more non-germline amino acids in framework regions to corresponding germline amino acids of the antibody, so long as binding properties are substantially retained. Similar methods can also be used in the constant region, e.g., in constant immunoglobulin domains.

[0274] Antibodies that bind to MMP-9 and/or MMP-2, e.g., an antibody described herein, may be modified in order to make the variable regions of the antibody more similar to one or more germline sequences. For example, an antibody can include one, two, three, or more amino acid substitutions, e.g., in a framework, CDR, or constant region, to make it more similar to a reference germline sequence. One exemplary germlining method can include identifying one or more germline sequences that are similar (e.g., most similar in a particular database) to the sequence of the isolated antibody. Mutations (at the amino acid level) are then made in the isolated antibody, either incrementally or in combination with other mutations. For example, a nucleic acid library that includes sequences encoding some or all possible germline mutations is made. The mutated antibodies are then evaluated, e.g., to identify an antibody that has one or more additional germline residues relative to the isolated antibody and that is still useful (e.g., has a functional activity). In one embodiment, as many germline residues are introduced into an isolated antibody as possible.

[0275] In one embodiment, mutagenesis is used to substitute or insert one or more germline residues into a framework and/or constant region. For example, a germline framework and/or constant region residue can be from a germline sequence that is similar (e.g., most similar) to the non-variable region being modified. After mutagenesis, activity (e.g., binding or other functional activity) of the antibody can be evaluated to determine if the germline residue or residues are tolerated (i.e., do not abrogate activity). Similar mutagenesis can be performed in the framework regions.

[0276] Selecting a germline sequence can be performed in different ways. For example, a germline sequence can be selected if it meets a predetermined criteria for selectivity or similarity, e.g., at least a certain percentage identity, e.g., at least 75, 80, 85, 90, 91, 92, 93, 94, 95, 96, 97, 98, 99, or 99.5% identity. The selection can be performed using at least 2, 3, 5, or 10 germline sequences. In the case of CDR1 and CDR2, identifying a similar germline sequence can include selecting one such sequence. In the case of CDR3, identifying a similar germline sequence can include selecting one such sequence, but may including using two germline sequences that separately contribute to the amino-terminal portion and the carboxy-terminal portion. In other implementations more than one or two germline sequences are used, e.g., to form a consensus sequence.

[0277] In one embodiment, with respect to a particular reference variable domain sequence, e.g., a sequence described herein, a related variable domain sequence has at least 30, 40, 50, 60, 70, 80, 90, 95 or 100% of the CDR amino acid positions that are not identical to residues in the reference CDR sequences, residues that are identical to residues at corresponding positions in a human germline sequence (i.e., an amino acid sequence encoded by a human germline nucleic acid).

[0278] In one embodiment, with respect to a particular reference variable domain sequence, e.g., a sequence described herein, a related variable domain sequence has at least 30, 50, 60, 70, 80, 85, 90, 91, 92, 93, 94, 95, 96, 97, 98, 99 or 100% of the FR regions identical to FR sequence from a human germline sequence, e.g., a germline sequence related to the reference variable domain sequence.

[0279] Accordingly, it is possible to isolate an antibody which has similar activity to a given antibody of interest, but is more similar to one or more germline sequences, particularly one or more human germline sequences. For example, an antibody can be at least 90, 91, 92, 93, 94, 95, 96, 97, 98, 99, or 99.5% identical to a germline sequence in a region outside the CDRs (e.g., framework regions). Further, an antibody can include at least 1, 2, 3, 4, or 5 germline residues in a CDR region, the germline residue being from a germline sequence of similar (e.g., most similar) to the variable region being modified. Germline sequences of primary interest are human germline sequences. The activity of the antibody (e.g., the binding activity as measured by K_{A}) can be within a factor or 100, 10, 5, 2, 0.5, 0.1, and 0.001 of the original antibody.

[0280] Germline sequences of human immunoglobin genes have been determined and are available from a number of sources, including the international ImMunoGeneTics information System® (IMGT), available via the world wide web at imgt.cines.fr, and the V BASE directory (compiled by Tomlinson, I. A. et al. MRC Centre for Protein Engineering, Cambridge, UK, available via the world wide web at vbase.mrc-cpe.cam.ac.uk).

[0281] Exemplary germline reference sequences for Vₖₐₚₚₐ include: O12/O2, O18/O8, A20, A30, L14, L1, L15, L4/18a, L5/L19, L8, L23, L9, L24, L11, L12, O11/O1, A17, A1, A18, A2, A19/A3, A23, A27, A11, L2/L16, L6, L20, L25, B3, B2, A26/A10, and A14. See, e.g., Tomlinson et al., 1995, EMBO J. 14(18):4628-3.

[0282] A germline reference sequence for the HC variable domain can be based on a sequence that has particular canonical structures, e.g., 1-3 structures in the H1 and H2 hypervariable loops. The canonical structures of hypervariable loops of an immunoglobulin variable domain can be inferred from its sequence, as described in Chothia et al., 1992, J. Mol. Biol. 227:799-817; Tomlinson et al., 1992, J. Mol. Biol. 227:776-798); and Tomlinson et al., 1995, EMBO J. 14(18):4628-38. Exemplary sequences with a 1-3 structure include: DP-1, DP-8, DP-12, DP-2, DP-25, DP-15, DP-7, DP-4, DP-31, DP-32, DP-33, DP-35, DP-40, 7-2, hv3005, hv3005f3, DP-46, DP-47, DP-58, DP-49, DP-50, DP-51, DP-53, and DP-54.

### Protein Production

[0283] Standard recombinant nucleic acid methods can be used to express a protein that binds to MMP-9 and/or MMP-2. Generally, a nucleic acid sequence encoding the protein is cloned into a nucleic acid expression vector. Of course, if the protein includes multiple polypeptide chains, each chain can be cloned into an expression vector, e.g., the same or different vectors, that are expressed in the same or different cells.

[0284] Antibody Production. Some antibodies, e.g., Fabs, can be produced in bacterial cells, e.g., E. coli cells. For example, if the Fab is encoded by sequences in a phage display vector that includes a suppressible stop codon between the display entity and a bacteriophage protein (or fragment thereof), the vector nucleic acid can be transferred into a bacterial cell that cannot suppress a stop codon. In this case, the Fab is not fused to the gene III protein and is secreted into the periplasm and/or media.

[0285] Antibodies can also be produced in eukaryotic cells. In one embodiment, the antibodies (e.g., scFv's) are expressed in a yeast cell such as Pichia (see, e.g., Powers et al., 2001, J. Immunol. Methods. 251:123-35), Hanseula, or Saccharomyces.

[0286] In one preferred embodiment, antibodies are produced in mammalian cells. Preferred mammalian host cells for expressing the clone antibodies or antigen-binding fragments thereof include Chinese Hamster Ovary (CHO cells) (including dhfr− CHO cells, described in Urlaub and Chasin, 1980, Proc. Natl. Acad. Sci. USA 77:4216-4220, used with a DHFR selectable marker, e.g., as described in Kaufman and Sharp, 1982, Mol. Biol. 159:601 621), lymphocytic cell lines, e.g., NS0 myeloma cells and SP2 cells, COS cells, HEK293T cells (J. Immunol. Methods (2004) 289(1-2):65-80.), and a cell from a transgenic animal, e.g., a transgenic mammal For example, the cell is a mammary epithelial cell.

[0287] In addition to the nucleic acid sequence encoding the diversified immunoglobulin domain, the recombinant expression vectors may carry additional sequences, such as sequences that regulate replication of the vector in host cells (e.g., origins of replication) and selectable marker genes. The selectable marker gene facilitates selection of host cells into which the vector has been introduced (see e.g., U.S. Pat. Nos. 4,399,216, 4,634,665 and 5,179,017). For example, typically the selectable marker gene confers resistance to drugs, such as G418, hygromycin or methotrexate, on a host cell into which the vector has been introduced. Preferred selectable marker genes include the dihydrofolate reductase (DHFR) gene (for use in dhfr⁻ host cells with methotrexate selection/amplification) and the neo gene (for G418 selection).

[0288] In an exemplary system for recombinant expression of an antibody, or antigen-binding portion thereof, a recombinant expression vector encoding both the antibody heavy chain and the antibody light chain is introduced into dhfr⁻ CHO cells by calcium phosphate-mediated transfection. Within the recombinant expression vector, the antibody heavy and light chain genes are each operatively linked to enhancer/promoter regulatory elements (e.g., derived from SV40, CMV, adenovirus and the like, such as a CMV enhancer/AdMLP promoter regulatory element or an SV40 enhancer/AdMLP promoter regulatory element) to drive high levels of transcription of the genes. The recombinant expression vector also carries a DHFR gene, which allows for selection of CHO cells that have been transfected with the vector using methotrexate selection/amplification. The selected transformant host cells are cultured to allow for expression of the antibody heavy and light chains and intact antibody is recovered from the culture medium. Standard molecular biology techniques are used to prepare the recombinant expression vector, transfect the host cells, select for transformants, culture the host cells and recover the antibody from the culture medium. For example, some antibodies can be isolated by affinity chromatography with a Protein A or Protein G coupled matrix.

[0289] For antibodies that include an Fc domain, the antibody production system may produce antibodies in which the Fc region is glycosylated. For example, the Fc domain of IgG molecules is glycosylated at asparagine 297 in the CH2 domain. This asparagine is the site for modification with biantennary-type oligosaccharides. It has been demonstrated that this glycosylation is required for effector functions mediated by Fcg receptors and complement C1q (Burton and Woof, 1992, Adv. Immunol. 51:1-84; Jefferis et al., 1998, Immunol. Rev. 163:59-76). In one embodiment, the Fc domain is produced in a mammalian expression system that appropriately glycosylates the residue corresponding to asparagine 297. The Fc domain can also include other eukaryotic post-translational modifications.

[0290] Antibodies can also be produced by a transgenic animal. For example, U.S. Pat. No. 5,849,992 describes a method of expressing an antibody in the mammary gland of a transgenic mammal A transgene is constructed that includes a milk-specific promoter and nucleic acids encoding the antibody of interest and a signal sequence for secretion. The milk produced by females of such transgenic mammals includes, secreted-therein, the antibody of interest. The antibody can be purified from the milk, or for some applications, used directly.

### Characterization of MMP-9/MMP-2 Binding Proteins

[0291] Binding of MMP-9/MMP-2 binding proteins to cells expressing MMP-9 and/or MMP-2 can be characterized in a number assays known in the art, including FACS (Fluorescence Activated Cell Sorting), immunofluorescence, and immunocytochemistry. MMP-9/MMP-2 binding protein is contacted with cells and/or tissues which express or contain MMP-9 and/or MMP-2, and binding is detected in accordance with the method being used. For example, a fluorescent detection system (e.g., fluorescent-labeled secondary antibody) employed for FACS and immunofluorescence analysis, or an enzymatic system is used for immunocytochemistry are generally used in these assays can be performed on non-perm. MMP-9/MMP-2 binding proteins can be characterized as to cellular binding by FACS (Fluorescence Activated Cell Sorting) using cells expressing MMP-9 and/or MMP-2. Individual cells held in a thin stream of fluid are passed through one or more laser beams cause light to scatter and fluorescent dyes to emit light at various frequencies. Photomultiplier tubes (PMT) convert light to electrical signals and cell data is collected. Forward and side scatter are used for preliminary identification of cells. Forward and side scatter are used to exclude debris and dead cells. Fluorescent labeling allows investigation of cell structure and function. Cell autofluorescence is generated by labeling cell structures with fluorescent dyes. FACS collects fluorescence signals in one to several channels corresponding to different laser excitation and fluorescence emission wavelength. Immunofluorescence, the most widely used application, involves the staining of cells with antibodies conjugated to fluorescent dyes such as fluorescein and phycoerythrin (PE). This method can be used to label MMP-9 or MMP-2 on the cell surface of MDA-MB-231 cells using biotinylated MMP-9/MMP-2 binding proteins. Biotin is used in these two-step detection systems in concert with conjugated steptavidin. Biotin is typically conjugated to proteins via primary amines (i.e., lysines). Usually, between 1.5 and 3 biotin molecules are conjugated to each antibody. A second fluorescently conjugated antibody (streptavidin/PE) is added which is specific for biotin.

[0292] MMP-9/MMP-2 binding proteins can be characterized in cultured cells expressing the MMP-9 antigen or the MMP-2 antigen. The method generally used is immunocytochemistry. Immunocytochemistry involves the use of antibodies that recognize parts of the receptor that are exposed to the outside environment when expressed at the cell surface (the ‘primary antibody’). If the experiment is carried out in intact cells, such an antibody will only bind to surface expressed receptors. Biotinylated or non-biotinylated MMP-9/MMP-2 binding proteins can be used. The secondary antibody is then either a streptavidin/HRP antibody (for biotinylated MMP-9/MMP-2 binding protein) or an anti-human IgG/HRP (for non-biotinylated MMP-9/MMP-2 binding protein). The staining can then be detected using an inverted microscope. The assay can be performed in the absence of MMP-9/MMP-2 binding protein and in presence of 10 μg/mL of MMP-9/MMP-2 binding protein.

[0293] MMP-9/MMP-2 binding proteins can be characterized in assays that measure their modulatory activity toward MMP-9, MMP-2 or fragments thereof in vitro or in vivo. For example, MMP-9 (or MMP-2) can be combined with a substrate such as Mca-Pro-Leu-Ala-Cys(Mob)-Trp-Ala-Arg-Dap(Dnp)-NH₂ under assay conditions permitting cleavage by MMP-9 (or MMP-2). The assay is performed in the absence of the MMP-9/MMP-2 binding protein, and in the presence of increasing concentrations of the MMP-9/MMP-2 binding protein. The concentration of binding protein at which 50% of the MMP-9 activity (or MMP-2 activity) (e.g., binding to the substrate) is inhibited is the IC₅₀ value (Inhibitory Concentration 50%) or EC₅₀ (Effective Concentration 50%) value for that binding protein. Within a series or group of binding proteins, those having lower IC₅₀ or EC₅₀ values are considered more potent inhibitors of MMP-9 (or MMP-2) than those binding proteins having higher IC₅₀ or EC₅₀ values. Exemplary binding proteins have an IC₅₀ value of less than 800 nM, 400 nM, 100 nM, 25 nM, 5 nM, or 1 nM, e.g., as measured in an in vitro assay for inhibition of MMP-9 activity (or MMP-2 activity) when the MMP-9 (or MMP-2) is at 2 pM.

[0294] MMP-9/MMP-2 binding proteins may also be characterized with reference to the activity of MMP-9 or MMP-2 on substrates (e.g., collagen, gelatin). For example, cleavage of gelatin by MMP-9 can be detected in zymography. The method is based on a SDS gel impregnated with a substrate, which is degraded by the proteases resolved during the incubation period. Coomassie blue staining of the gels reveals proteolytic fragments as white bands on a dark blue background. Within a certain range, the band intensity can be related linearly to the amount of the protease loaded. Cells expressing both MMP-9 and MMP-2 are used in this assay. The assay is performed in the absence of the MMP-9/MMP-2 binding protein, and in the presence of increasing concentrations of the MMP-9/MMP-2 binding protein. The concentration of binding protein at which 50% of the MMP-9 activity (e.g., binding to the substrate) is inhibited is the IC₅₀ value (Inhibitory Concentration 50%) or EC₅₀ (Effective Concentration 50%) value for that binding protein. Within a series or group of binding proteins, those having lower IC₅₀ or EC₅₀ values are considered more potent inhibitors of MMP-9 than those binding proteins having higher IC₅₀ or EC₅₀ values. Exemplary binding proteins have an IC₅₀ value of less than 800 nM, 400 nM, 100 nM, 25 nM, 5 nM, or 1 nM, e.g., as measured in an in vitro assay for inhibition of MMP-9 activity. The same is true for binding and inhibition of MMP-2.

[0295] The binding proteins can also be evaluated for selectivity toward MMP-9 or MMP-2. For example, an MMP-9/MMP-2 binding protein can be assayed for its potency toward MMP-9, MMP-2 and a panel of MMPs and other enzymes, e.g., human and/or mouse enzymes, e.g., MMP-1, -3, -7, -8, -12, -13, -14, -16, -17, -24, and TACE, and an IC₅₀ value or EC₅₀ value can be determined for each MMP. In one embodiment, a compound that demonstrates a low IC₅₀ value or EC₅₀ value for the MMP-9, and a higher IC₅₀ value or EC₅₀ value, e.g., at least 2-, 5-, or 10-fold higher, for another MMP within the test panel (e.g., MMP-1, -10) is considered to be selective toward MMP-9.

[0296] MMP-9/MMP-2 binding proteins can be evaluated for their ability to inhibit MMP-9 in a cell based assay.

[0297] A pharmacokinetics study in rat, mice, or monkey can be performed with MMP-9/MMP-2 binding proteins for determining MMP-9 or MMP-2 half-life in the serum. Likewise, the effect of the binding protein can be assessed in vivo, e.g., in an animal model for a disease, for use as a therapeutic, for example, to treat a disease or condition described herein, e.g., a cancer (e.g., metastatic cancer, e.g., metastatic breast cancer), an inflammatory disease (e.g., chronic obstructive pulmonary disease (COPD), asthma, rhinitis (e.g., allergic rhinitis), inflammatory bowel disease, synovitis, rheumatoid arthritis), heart failure, septic shock, neuropathic pain, osteoarthritis, or an ocular condition (e.g., macular degeneration).

### Characterization of MMP-9 Binding Proteins

[0298] Binding of MMP-9 binding proteins to cells expressing MMP-9 can be characterized in a number assays known in the art, including FACS (Fluorescence Activated Cell Sorting), immunofluorescence, and immunocytochemistry. MMP-9 binding protein is contacted with cells and/or tissues which express or contain MMP-9, and binding is detected in accordance with the method being used. For example, a fluorescent detection system (e.g., fluorescent-labeled secondary antibody) employed for FACS and immunofluorescence analysis, or a enzymatic system is used for immunocytochemistry are generally used in these assays. MMP-9 binding proteins can be characterized as to cellular binding by FACS (Fluorescence Activated Cell Sorting) using cells expressing MMP-9. Individual cells held in a thin stream of fluid are passed through one or more laser beams cause light to scatter and fluorescent dyes to emit light at various frequencies. Photomultiplier tubes (PMT) convert light to electrical signals and cell data is collected. Forward and side scatter are used for preliminary identification of cells. Forward and side scatter are used to exclude debris and dead cells. Fluorescent labeling allows investigation of cell structure and function. Cell autofluorescence is generated by labeling cell structures with fluorescent dyes. FACS collects fluorescence signals in one to several channels corresponding to different laser excitation and fluorescence emission wavelength. Immunofluorescence, the most widely used application, involves the staining of cells with antibodies conjugated to fluorescent dyes such as fluorescein and phycoerythrin (PE). This method can be used to label MMP-9 on the cell surface of MDA-MB-231 cells using biotinylated MMP-9 binding proteins. Biotin is used in these two-step detection systems in concert with conjugated steptavidin. Biotin is typically conjugated to proteins via primary amines (i.e., lysines). Usually, between 1.5 and 3 biotin molecules are conjugated to each antibody. A second fluorescently conjugated antibody (streptavidin/PE) is added which is specific for biotin.

[0299] MMP-9 binding proteins can be characterized in cultured cells expressing the MMP-9 antigen. The method generally used is immunocytochemistry. Immunocytochemistry involves the use of antibodies that recognize parts of the receptor that are exposed to the outside environment when expressed at the cell surface (the ‘primary antibody’). If the experiment is carried out in intact cells, such an antibody will only bind to surface expressed receptors. Biotinylated or non-biotinylated MMP-9 binding proteins can be used. The secondary antibody is then either a streptavidin/HRP antibody (for biotinylated MMP-9 binding protein) or an anti-human IgG/HRP (for non-biotinylated MMP-9 binding protein). The staining can then be detected using an inverted microscope. The assay can be performed in the absence of MMP-9 binding protein and in presence of 10 μg/mL of MMP-9 binding protein.

[0300] MMP-9 binding proteins can be characterized in assays that measure their modulatory activity toward MMP-9 or fragments thereof in vitro or in vivo. For example, MMP-9 can be combined with a substrate such as Mca-Pro-Leu-Ala-Cys(Mob)-Trp-Ala-Arg-Dap(Dnp)-NH₂ under assay conditions permitting cleavage by MMP-9. The assay is performed in the absence of the MMP-9 binding protein, and in the presence of increasing concentrations of the MMP-9 binding protein. The concentration of binding protein at which 50% of the MMP-9 activity (e.g., binding to the substrate) is inhibited is the IC₅₀ value (Inhibitory Concentration 50%) or EC₅₀ (Effective Concentration 50%) value for that binding protein. Within a series or group of binding proteins, those having lower IC₅₀ or EC₅₀ values are considered more potent inhibitors of MMP-9 than those binding proteins having higher IC₅₀ or EC₅₀ values. Exemplary binding proteins have an IC₅₀ value of less than 800 nM, 400 nM, 100 nM, 25 nM, 5 nM, or 1 nM, e.g., as measured in an in vitro assay for inhibition of MMP-9 activity when the MMP-9 is at 2 pM.

[0301] MMP-9 binding proteins may also be characterized with reference to the activity of MMP-9 on substrates (e.g., collagen, gelatin). For example, cleavage of gelatin by MMP-9 can be detected in zymography. The method is based on a SDS gel impregnated with a substrate, which is degraded by the proteases resolved during the incubation period. Coomassie blue staining of the gels reveals proteolytic fragments as white bands on a dark blue background. Within a certain range, the band intensity can be related linearly to the amount of the protease loaded. Cells expressing both MMP-9 and MMP-2 are used in this assay. The assay is performed in the absence of the MMP-9 binding protein, and in the presence of increasing concentrations of the MMP-9 binding protein. The concentration of binding protein at which 50% of the MMP-2 activity (e.g., binding to the substrate) is inhibited is the IC₅₀ value (Inhibitory Concentration 50%) or EC₅₀ (Effective Concentration 50%) value for that binding protein. Within a series or group of binding proteins, those having lower IC₅₀ or EC₅₀ values are considered more potent inhibitors of MMP-9 than those binding proteins having higher IC₅₀ or EC₅₀ values. Exemplary binding proteins have an IC₅₀ value of less than 800 nM, 400 nM, 100 nM, 25 nM, 5 nM, or 1 nM, e.g., as measured in an in vitro assay for inhibition of MMP-9 activity.

[0302] The binding proteins can also be evaluated for selectivity toward MMP-9. For example, an MMP-9 binding protein can be assayed for its potency toward MMP-9 and a panel of MMPs and other enzymes, e.g., human and/or mouse enzymes, e.g., MMP-1, -2, -3, -7, -8, -12, -13, -14, -16, -17, -24, and TACE, and an IC₅₀ value or EC₅₀ value can be determined for each MMP. In one embodiment, a compound that demonstrates a low IC₅₀ value or EC₅₀ value for the MMP-9, and a higher IC₅₀ value or EC₅₀ value, e.g., at least 2-, 5-, or 10-fold higher, for another MMP within the test panel (e.g., MMP-1, -10) is considered to be selective toward MMP-9.

[0303] MMP-9 binding proteins can be evaluated for their ability to inhibit MMP-9 in a cell based assay, e.g., in situ zymography, e.g., in Colo205 cells or MCF-7 cells.

[0304] A pharmacokinetics study in rat, mice, or monkey can be performed with MMP-9 binding proteins for determining MMP-9 half-life in the serum. Likewise, the effect of the binding protein can be assessed in vivo, e.g., in an animal model for a disease, for use as a therapeutic, for example, to treat a disease or condition described herein, e.g., a cancer (e.g., metastatic cancer, e.g., metastatic breast cancer), an inflammatory disease (e.g., chronic obstructive pulmonary disease (COPD), asthma, rhinitis (e.g., allergic rhinitis), inflammatory bowel disease, synovitis, rheumatoid arthritis), heart failure, septic shock, neuropathic pain, inflammatory pain, osteoarthritis, or an ocular condition (e.g., macular degeneration).

### Pharmaceutical Compositions

[0305] In another aspect, the disclosure provides compositions, e.g., pharmaceutically acceptable compositions or pharmaceutical compositions, which include an MMP-9/MMP-2 binding protein or MMP-9 binding protein, e.g., an antibody molecule, other polypeptide or peptide identified as binding to MMP-9 and/or MMP-2 described herein. The MMP-9/MMP-2 binding protein or MMP-9 binding protein can be formulated together with a pharmaceutically acceptable carrier. Pharmaceutical compositions include therapeutic compositions and diagnostic compositions, e.g., compositions that include labeled MMP-9/MMP-2 binding proteins or MMP-9 binding proteins for in vivo imaging.

[0306] A pharmaceutically acceptable carrier includes any and all solvents, dispersion media, coatings, antibacterial and antifungal agents, isotonic and absorption delaying agents, and the like that are physiologically compatible. Preferably, the carrier is suitable for intravenous, intramuscular, subcutaneous, parenteral, spinal, or epidermal administration (e.g., by injection or infusion), although carriers suitable for inhalation and intranasal administration are also contemplated. Depending on the route of administration, the MMP-9/MMP-2 binding protein or MMP-9 binding protein may be coated in a material to protect the compound from the action of acids and other natural conditions that may inactivate the compound.

[0307] A pharmaceutically acceptable salt is a salt that retains the desired biological activity of the parent compound and does not impart any undesired toxicological effects (see e.g., Berge, S. M., et al., 1977, J. Pharm. Sci. 66:1-19). Examples of such salts include acid addition salts and base addition salts. Acid addition salts include those derived from nontoxic inorganic acids, such as hydrochloric, nitric, phosphoric, sulfuric, hydrobromic, hydroiodic, phosphorous, and the like, as well as from nontoxic organic acids such as aliphatic mono- and dicarboxylic acids, phenyl-substituted alkanoic acids, hydroxy alkanoic acids, aromatic acids, aliphatic and aromatic sulfonic acids, and the like. Base addition salts include those derived from alkaline earth metals, such as sodium, potassium, magnesium, calcium, and the like, as well as from nontoxic organic amines, such as N,N′-dibenzylethylenediamine, N-methylglucamine, chloroprocaine, choline, diethanolamine, ethylenediamine, procaine, and the like.

[0308] The compositions may be in a variety of forms. These include, for example, liquid, semi-solid and solid dosage forms, such as liquid solutions (e.g., injectable and infusible solutions), dispersions or suspensions, tablets, pills, powders, liposomes and suppositories. The form can depend on the intended mode of administration and therapeutic application. Many compositions are in the form of injectable or infusible solutions, such as compositions similar to those used for administration of humans with antibodies. An exemplary mode of administration is parenteral (e.g., intravenous, subcutaneous, intraperitoneal, intramuscular). In one embodiment, the MMP-9/MMP-2 binding protein or MMP-9 binding protein is administered by intravenous infusion or injection. In another preferred embodiment, the MMP-9/MMP-2 binding protein or MMP-9 binding protein is administered by intramuscular or subcutaneous injection.

[0309] The phrases “parenteral administration” and “administered parenterally” as used herein means modes of administration other than enteral and topical administration, usually by injection, and includes, without limitation, intravenous, intramuscular, intraarterial, intrathecal, intracapsular, intraorbital, intracardiac, intradermal, intraperitoneal, transtracheal, subcutaneous, subcuticular, intraarticular, subcapsular, subarachnoid, intraspinal, epidural and intrasternal injection and infusion.

[0310] The composition can be formulated as a solution, microemulsion, dispersion, liposome, or other ordered structure suitable to high drug concentration. Sterile injectable solutions can be prepared by incorporating the binding protein in the required amount in an appropriate solvent with one or a combination of ingredients enumerated above, as required, followed by filtered sterilization. Generally, dispersions are prepared by incorporating the active compound into a sterile vehicle that contains a basic dispersion medium and the required other ingredients from those enumerated above. In the case of sterile powders for the preparation of sterile injectable solutions, the preferred methods of preparation are vacuum drying and freeze-drying that yields a powder of the active ingredient plus any additional desired ingredient from a previously sterile-filtered solution thereof. The proper fluidity of a solution can be maintained, for example, by the use of a coating such as lecithin, by the maintenance of the required particle size in the case of dispersion and by the use of surfactants. Prolonged absorption of injectable compositions can be brought about by including in the composition an agent that delays absorption, for example, monostearate salts and gelatin.

[0311] An MMP-9/MMP-2 binding protein or MMP-9 binding protein can be administered by a variety of methods, although for many applications, the preferred route/mode of administration is intravenous injection or infusion. For example, for therapeutic applications, the MMP-9 binding protein can be administered by intravenous infusion at a rate of less than 30, 20, 10, 5, or 1 mg/min to reach a dose of about 1 to 100 mg/m² or 7 to 25 mg/m². The route and/or mode of administration will vary depending upon the desired results. In certain embodiments, the active compound may be prepared with a carrier that will protect the compound against rapid release, such as a controlled release formulation, including implants, and microencapsulated delivery systems. Biodegradable, biocompatible polymers can be used, such as ethylene vinyl acetate, polyanhydrides, polyglycolic acid, collagen, polyorthoesters, and polylactic acid. Many methods for the preparation of such formulations are available. See, e.g., Sustained and Controlled Release Drug Delivery Systems, J. R. Robinson, ed., 1978, Marcel Dekker, Inc., New York.

[0312] Pharmaceutical compositions can be administered with medical devices. For example, in one embodiment, a pharmaceutical composition disclosed herein can be administered with a device, e.g., a needleless hypodermic injection device, a pump, or implant.

[0313] In certain embodiments, an MMP-9/MMP-2 binding protein or MMP-9 binding protein can be formulated to ensure proper distribution in vivo. For example, the blood-brain barrier (BBB) excludes many highly hydrophilic compounds. To ensure that the therapeutic compounds disclosed herein cross the BBB (if desired), they can be formulated, for example, in liposomes. For methods of manufacturing liposomes, see, e.g., U.S. Pat. Nos. 4,522,811; 5,374,548; and 5,399,331. The liposomes may comprise one or more moieties that are selectively transported into specific cells or organs, thus enhance targeted drug delivery (see, e.g., V. V. Ranade, 1989, J. Clin. Pharmacol. 29:685).

[0314] Dosage regimens are adjusted to provide the optimum desired response (e.g., a therapeutic response). For example, a single bolus may be administered, several divided doses may be administered over time or the dose may be proportionally reduced or increased as indicated by the exigencies of the therapeutic situation. It is especially advantageous to formulate parenteral compositions in dosage unit form for ease of administration and uniformity of dosage. Dosage unit form as used herein refers to physically discrete units suited as unitary dosages for the subjects to be treated; each unit contains a predetermined quantity of active compound calculated to produce the desired therapeutic effect in association with the required pharmaceutical carrier. The specification for the dosage unit forms can be dictated by and directly dependent on (a) the unique characteristics of the active compound and the particular therapeutic effect to be achieved, and (b) the limitations inherent in the art of compounding such an active compound for the treatment of sensitivity in individuals.

[0315] An exemplary, non-limiting range for a therapeutically or prophylactically effective amount of an antibody disclosed herein is 0.1-20 mg/kg, more preferably 1-10 mg/kg. An anti-MMP-9 antibody or an MMP-9/MMP-2 antibody can be administered, e.g., by intravenous infusion, e.g., at a rate of less than 30, 20, 10, 5, or 1 mg/min to reach a dose of about 1 to 100 mg/m² or about 5 to 30 mg/m². For binding proteins smaller in molecular weight than an antibody, appropriate amounts can be proportionally less. Dosage values may vary with the type and severity of the condition to be alleviated. For a particular subject, specific dosage regimens can be adjusted over time according to the individual need and the professional judgment of the person administering or supervising the administration of the compositions.

[0316] The pharmaceutical compositions disclosed herein may include a “therapeutically effective amount” or a “prophylactically effective amount” of an MMP-9/MMP-2 binding protein or MMP-9 binding protein disclosed herein. A “therapeutically effective amount” refers to an amount effective, at dosages and for periods of time necessary, to achieve the desired therapeutic result. A therapeutically effective amount of the composition may vary according to factors such as the disease state, age, sex, and weight of the individual, and the ability of the protein to elicit a desired response in the individual. A therapeutically effective amount is also one in which any toxic or detrimental effects of the composition is outweighed by the therapeutically beneficial effects.

[0317] A “therapeutically effective dosage” preferably modulates a measurable parameter, e.g., levels of circulating IgG antibodies or enzymatic activity, by a statistically significant degree or at least about 20%, more preferably by at least about 40%, even more preferably by at least about 60%, and still more preferably by at least about 80% relative to untreated subjects. The ability of a compound to modulate a measurable parameter, e.g., a disease-associated parameter, can be evaluated in an animal model system predictive of efficacy in human disorders and conditions, e.g., a cancer (e.g., metastatic cancer, e.g., metastatic breast cancer), an inflammatory disease (e.g., chronic obstructive pulmonary disease (COPD), asthma, rhinitis (e.g., allergic rhinitis), inflammatory bowel disease, synovitis, rheumatoid arthritis), heart failure, septic shock, neuropathic pain, osteoarthritis, or an ocular condition (e.g., macular degeneration). Alternatively, this property of a composition can be evaluated by examining the ability of the compound to modulate a parameter in vitro.

[0318] A “prophylactically effective amount” refers to an amount effective, at dosages and for periods of time necessary, to achieve the desired prophylactic result. Typically, because a prophylactic dose is used in subjects prior to or at an earlier stage of disease, the prophylactically effective amount will be less than the therapeutically effective amount.

### Stabilization and Retention

[0319] In one embodiment, an MMP-9/MMP-2 binding protein or MMP-9 binding protein is physically associated with a moiety that improves its stabilization and/or retention in circulation, e.g., in blood, serum, lymph, or other tissues, e.g., by at least 1.5, 2, 5, 10, or 50 fold. For example, an MMP-9/MMP-2 binding protein or MMP-9 binding protein can be associated with a polymer, e.g., a substantially non-antigenic polymer, such as polyalkylene oxides or polyethylene oxides. Suitable polymers will vary substantially by weight. Polymers having molecular number average weights ranging from about 200 to about 35,000 (or about 1,000 to about 15,000, and 2,000 to about 12,500) can be used. For example, an MMP-9/MMP-2 binding protein or MMP-9 binding protein can be conjugated to a water soluble polymer, e.g., hydrophilic polyvinyl polymers, e.g. polyvinylalcohol and polyvinylpyrrolidone. A non-limiting list of such polymers include polyalkylene oxide homopolymers such as polyethylene glycol (PEG) or polypropylene glycols, polyoxyethylenated polyols, copolymers thereof and block copolymers thereof, provided that the water solubility of the block copolymers is maintained.

[0320] An MMP-9/MMP-2 binding protein or MMP-9 binding protein can also be associated with a carrier protein, e.g., a serum albumin, such as a human serum albumin. For example, a translational fusion can be used to associate the carrier protein with the MMP-9/MMP-2 binding protein.

### Kits

[0321] An MMP-9/MMP-2 binding protein or MMP-9 binding protein described herein can be provided in a kit, e.g., as a component of a kit. For example, the kit includes (a) an MMP-9/MMP-2 binding protein or MMP-9 binding protein, e.g., a composition that includes an MMP-9/MMP-2 binding protein or MMP-9 binding protein, and, optionally (b) informational material. The informational material can be descriptive, instructional, marketing or other material that relates to the methods described herein and/or the use of an MMP-9/MMP-2 binding protein or MMP-9 binding protein for the methods described herein.

[0322] The informational material of the kits is not limited in its form. In one embodiment, the informational material can include information about production of the compound, molecular weight of the compound, concentration, date of expiration, batch or production site information, and so forth. In one embodiment, the informational material relates to using the binding protein to treat, prevent, or diagnosis of disorders and conditions, e.g., a cancer (e.g., metastatic cancer, e.g., metastatic breast cancer), an inflammatory disease (e.g., chronic obstructive pulmonary disease (COPD), asthma, rhinitis (e.g., allergic rhinitis), inflammatory bowel disease, synovitis, rheumatoid arthritis), heart failure, septic shock, neuropathic pain, osteoarthritis, or an ocular condition (e.g., macular degeneration).

[0323] In one embodiment, the informational material can include instructions to administer an MMP-9/MMP-2 binding protein or MMP-9 binding protein in a suitable manner to perform the methods described herein, e.g., in a suitable dose, dosage form, or mode of administration (e.g., a dose, dosage form, or mode of administration described herein). In another embodiment, the informational material can include instructions to administer an MMP-9/MMP-2 binding protein or MMP-9 binding protein to a suitable subject, e.g., a human, e.g., a human having, or at risk for, a disorder or condition described herein, e.g., a cancer (e.g., metastatic cancer, e.g., metastatic breast cancer or bladder cancer), an inflammatory disease (e.g., chronic obstructive pulmonary disease (COPD), asthma, rhinitis (e.g., allergic rhinitis), inflammatory bowel disease, synovitis, rheumatoid arthritis), heart failure, septic shock, neuropathic pain, osteoarthritis, or an ocular condition (e.g., macular degeneration). For example, the material can include instructions to administer an MMP-9/MMP-2 binding protein or MMP-9 binding protein to a patient with a disorder or condition described herein, e.g., a cancer (e.g., metastatic cancer, e.g., metastatic breast cancer or bladder), an inflammatory disease (e.g., chronic obstructive pulmonary disease (COPD), asthma, rhinitis (e.g., allergic rhinitis), inflammatory bowel disease, synovitis, rheumatoid arthritis), heart failure, septic shock, neuropathic pain, osteoarthritis, or an ocular condition (e.g., macular degeneration). The informational material of the kits is not limited in its form. In many cases, the informational material, e.g., instructions, is provided in print but may also be in other formats, such as computer readable material.

[0324] An MMP-9/MMP-2 binding protein or MMP-9 binding protein can be provided in any form, e.g., liquid, dried or lyophilized form. It is preferred that an MMP-9/MMP-2 binding protein or MMP-9 binding protein be substantially pure and/or sterile. When an MMP-9/MMP-2 binding protein or MMP-9 binding protein is provided in a liquid solution, the liquid solution preferably is an aqueous solution, with a sterile aqueous solution being preferred. When an MMP-9/MMP-2 binding protein or MMP-9 binding protein is provided as a dried form, reconstitution generally is by the addition of a suitable solvent. The solvent, e.g., sterile water or buffer, can optionally be provided in the kit.

[0325] The kit can include one or more containers for the composition containing an MMP-9/MMP-2 binding protein or MMP-9 binding protein. In some embodiments, the kit contains separate containers, dividers or compartments for the composition and informational material. For example, the composition can be contained in a bottle, vial, or syringe, and the informational material can be contained association with the container. In other embodiments, the separate elements of the kit are contained within a single, undivided container. For example, the composition is contained in a bottle, vial or syringe that has attached thereto the informational material in the form of a label. In some embodiments, the kit includes a plurality (e.g., a pack) of individual containers, each containing one or more unit dosage forms (e.g., a dosage form described herein) of an MMP-9 binding protein. For example, the kit includes a plurality of syringes, ampules, foil packets, or blister packs, each containing a single unit dose of an MMP-9/MMP-2 binding protein or MMP-9 binding protein. The containers of the kits can be air tight, waterproof (e.g., impermeable to changes in moisture or evaporation), and/or light-tight.

[0326] The kit optionally includes a device suitable for administration of the composition, e.g., a syringe, inhalant, dropper (e.g., eye dropper), swab (e.g., a cotton swab or wooden swab), or any such delivery device. In one embodiment, the device is an implantable device that dispenses metered doses of the binding protein. The disclosure also features a method of providing a kit, e.g., by combining components described herein.

### Treatments

[0327] Proteins that bind to MMP-9 and/or MMP-2 and identified by the method described herein and/or detailed herein have therapeutic and prophylactic utilities, particularly in human subjects. These binding proteins are administered to a subject to treat, prevent, and/or diagnose a variety of disorders, including e.g., a cancer (e.g., metastatic cancer, e.g., metastatic breast canceror bladder cancer), an inflammatory disease (e.g., chronic obstructive pulmonary disease (COPD), asthma, rhinitis (e.g., allergic rhinitis), inflammatory bowel disease, synovitis, rheumatoid arthritis), heart failure (e.g., myocardial infarction, hypertension or viral myocarditis), septic shock, neuropathic pain, osteoarthritis, or an ocular condition (e.g., macular degeneration), or even to cells in culture, e.g. in vitro or ex vivo. Treating includes administering an amount effective to alleviate, relieve, alter, remedy, ameliorate, improve or affect the disorder, the symptoms of the disorder or the predisposition toward the disorder. The treatment may also delay onset, e.g., prevent onset, or prevent deterioration of a disease or condition.

[0328] Exemplary disorders include a cancer (e.g., metastatic cancer, e.g., metastatic breast cancer or bladder cancer), an inflammatory disease (e.g., chronic obstructive pulmonary disease (COPD), asthma, rhinitis (e.g., allergic rhinitis), inflammatory bowel disease, synovitis, rheumatoid arthritis), heart failure (e.g., myocardial infarction, hypertension or viral myocarditis), septic shock, neuropathic pain, osteoarthritis, or an ocular condition (e.g., macular degeneration). Some of these disorders are discussed above. Still other disorders that can be treated using an MMP-9/MMP-2 binding protein include: aortic aneurysms, stroke, hemorrhage, reperfusion injury, cerebral infarction, cerebral ischemia, periodontitis, autoimmune blistering disorders of the skin, dermal photoaging.

[0329] As used herein, an amount of an target-binding agent effective to prevent a disorder, or a prophylactically effective amount of the binding agent refers to an amount of a target binding agent, e.g., an MMP-9/MMP-2 binding protein or MMP-9 binding protein, e.g., an anti-MMP-9/MMP-2 antibody or MMP-9 antibody described herein, which is effective, upon single- or multiple-dose administration to the subject, for preventing or delaying the occurrence of the onset or recurrence of a disorder, e.g., a disorder described herein.

[0330] A binding agent described herein can be used to reduce angiogenesis in a subject, e.g., to treat a cancer (e.g., a solid tumor) or an angiogenesis-associated disorder. The method includes administering the binding to the subject, e.g., in an amount effective to modulate angiogenesis, a symptom of the disorder, or progression of the disorder. The agent (e.g., an MMP-9/MMP-2 binding protein or MMP-9 binding protein, e.g., an anti-MMP-9/MMP-2 antibody or MMP-9 antibody) may be administered multiple times (e.g., at least two, three, five, or ten times) before a therapeutically effective amount is attained.

[0331] Methods of administering MMP-9/MMP-2 binding proteins or MMP-9 binding proteins and other agents are also described in “Pharmaceutical Compositions.” Suitable dosages of the molecules used can depend on the age and weight of the subject and the particular drug used. The binding proteins can be used as competitive agents to inhibit, reduce an undesirable interaction, e.g., between a natural or pathological agent and the MMP-9 and/or MMP-2. The dose of the MMP-9/MMP-2 binding protein or MMP-9 binding protein can be the amount sufficient to block 90%, 95%, 99%, or 99.9% of the activity of MMP-9/MMP-2 or MMP-9 in the patient, especially at the site of disease. Depending on the disease, this may require 0.1, 1.0, 3.0, 6.0, or 10.0 mg/Kg. For an IgG having a molecular mass of 150,000 g/mole (two binding sites), these doses correspond to approximately 18 nM, 180 nM, 540 nM, 1.08 μM, and 1.8 μM of binding sites for a 5 L blood volume.

[0332] In one embodiment, the MMP-9/MMP-2 binding proteins or MMP-9 binding proteins are used to inhibit an activity (e.g., inhibit at least one activity of, reduce proliferation, migration, growth or viability) of a cell, e.g., a cancer cell in vivo. The binding proteins can be used by themselves or conjugated to an agent, e.g., a cytotoxic drug, cytotoxin enzyme, or radioisotope. This method includes: administering the binding protein alone or attached to an agent (e.g., a cytotoxic drug), to a subject requiring such treatment. For example, MMP-9/MMP-2 binding proteins and MMP-9 binding proteins that do not substantially inhibit MMP-9 or MMP-2 may be used to deliver nanoparticles containing agents, such as toxins, to MMP-9 and/or MMP-2 associated cells or tissues, e.g., tumors.

[0333] Because the MMP-9/MMP-2 binding proteins recognize MMP-9-expressing cells and MMP-2 expressing cells and can bind to cells that are associated with (e.g., in proximity of or intermingled with) cancer cells, e.g., cancerous lung, liver, colon, breast, ovarian, epidermal, laryngeal, and cartilage cells, and particularly metastatic cells thereof, MMP-9/MMP-2 binding proteins can be used to inhibit (e.g., inhibit at least one activity, reduce growth and proliferation, or kill) any such cells and inhibit carcinogenesis. Reducing MMP-9 activity and/or MMP-2 activity near a cancer can indirectly inhibit (e.g., inhibit at least one activity, reduce growth and proliferation, or kill) the cancer cells which may be dependent on the MMP-9 activity and/or MMP-2 activity for metastasis, activation of growth factors, and so forth.

[0334] Similarly, because the MMP-9 binding proteins recognize MMP-9-expressing cells and can bind to cells that are associated with (e.g., in proximity of or intermingled with) cancer cells, e.g., cancerous lung, liver, colon, breast, ovarian, epidermal, laryngeal, and cartilage cells, and particularly metastatic cells thereof, leukemia, B cell lymphoma, and multiple myeloma, MMP-9 binding proteins can be used to inhibit (e.g., inhibit at least one activity, reduce growth and proliferation, or kill) any such cells and inhibit carcinogenesis. Reducing MMP-9 activity near a cancer can indirectly inhibit (e.g., inhibit at least one activity, reduce growth and proliferation, or kill) the cancer cells which may be dependent on the MMP-9 activity for metastasis, activation of growth factors, and so forth.

[0335] Alternatively, the binding proteins bind to cells in the vicinity of the cancerous cells, but are sufficiently close to the cancerous cells to directly or indirectly inhibit (e.g., inhibit at least one activity, reduce growth and proliferation, or kill) the cancers cells. Thus, the MMP-9/MMP-2 binding proteins or MMP-9 binding proteins (e.g., modified with a toxin, e.g., a cytotoxin) can be used to selectively inhibit cells in cancerous tissue (including the cancerous cells themselves and cells associated with or invading the cancer).

[0336] The binding proteins may be used to deliver an agent (e.g., any of a variety of cytotoxic and therapeutic drugs) to cells and tissues where MMP-9 and/or MMP-2 is present. Exemplary agents include a compound emitting radiation, molecules of plants, fungal, or bacterial origin, biological proteins, and mixtures thereof. The cytotoxic drugs can be intracellularly acting cytotoxic drugs, such as toxins short range radiation emitters, e.g., short range, high energy α-emitters.

[0337] To target MMP-9 expressing cells and/or MMP-2 expressing cells, particularly cancerous cells, a prodrug system can be used. For example, a first binding protein is conjugated with a prodrug which is activated only when in close proximity with a prodrug activator. The prodrug activator is conjugated with a second binding protein, preferably one which binds to a non competing site on the target molecule. Whether two binding proteins bind to competing or non competing binding sites can be determined by conventional competitive binding assays. Exemplary drug prodrug pairs are described in Blakely et al., (1996) Cancer Research, 56:3287 3292.

[0338] The MMP-9/MMP-2 binding proteins or MMP-9 binding proteins can be used directly in vivo to eliminate antigen-expressing cells via natural complement-dependent cytotoxicity (CDC) or antibody dependent cellular cytotoxicity (ADCC). The binding proteins described herein can include complement binding effector domain, such as the Fc portions from IgG1, -2, or -3 or corresponding portions of IgM which bind complement. In one embodiment, a population of target cells is ex vivo treated with a binding agent described herein and appropriate effector cells. The treatment can be supplemented by the addition of complement or serum containing complement. Further, phagocytosis of target cells coated with a binding protein described herein can be improved by binding of complement proteins. In another embodiment target, cells coated with the binding protein which includes a complement binding effector domain are lysed by complement.

[0339] Methods of administering MMP-9/MMP-2 binding proteins or MMP-9 binding proteins are described in “Pharmaceutical Compositions.” Suitable dosages of the molecules used will depend on the age and weight of the subject and the particular drug used. The binding proteins can be used as competitive agents to inhibit or reduce an undesirable interaction, e.g., between a natural or pathological agent and the MMP-9 or MMP-2.

[0340] The MMP-9/MMP-2 binding protein and MMP-9 binding protein can be used to deliver macro and micromolecules, e.g., a gene into the cell for gene therapy purposes into the endothelium or epithelium and target only those tissues expressing the MMP-9 and/or MMP-2. The binding proteins may be used to deliver a variety of cytotoxic drugs including therapeutic drugs, a compound emitting radiation, molecules of plants, fungal, or bacterial origin, biological proteins, and mixtures thereof. The cytotoxic drugs can be intracellularly acting cytotoxic drugs, such as short range radiation emitters, including, for example, short range, high energy a emitters, as described herein.

[0341] In the case of polypeptide toxins, recombinant nucleic acid techniques can be used to construct a nucleic acid that encodes the binding protein (e.g., antibody or antigen-binding fragment thereof) and the cytotoxin (or a polypeptide component thereof) as translational fusions. The recombinant nucleic acid is then expressed, e.g., in cells and the encoded fusion polypeptide isolated.

[0342] Alternatively, the MMP-9/MMP-2 binding protein or MMP-9 binding protein can be coupled to high energy radiation emitters, for example, a radioisotope, such as ¹³¹I, a γ-emitter, which, when localized at a site, results in a killing of several cell diameters. See, e.g., S. E. Order, “Analysis, Results, and Future Prospective of the Therapeutic Use of Radiolabeled Antibody in Cancer Therapy”, Monoclonal Antibodies for Cancer Detection and Therapy, R. W. Baldwin et al. (eds.), pp 303 316 (Academic Press 1985). Other suitable radioisotopes include a emitters, such as ²¹²Bi, ²¹³Bi, and ²¹¹At, and b emitters, such as ¹⁸⁶Re and ⁹⁰Y. Moreover, ¹⁷⁷Lu may also be used as both an imaging and cytotoxic agent.

[0343] Radioimmunotherapy (RIT) using antibodies labeled with ¹³¹I, ⁹⁰Y, and ¹⁷⁷Lu is under intense clinical investigation. There are significant differences in the physical characteristics of these three nuclides and as a result, the choice of radionuclide is very critical in order to deliver maximum radiation dose to a tissue of interest. The higher beta energy particles of ⁹⁰Y may be good for bulky tumors. The relatively low energy beta particles of ¹³¹I are ideal, but in vivo dehalogenation of radioiodinated molecules is a major disadvantage for internalizing antibody. In contrast, ¹⁷⁷Lu has low energy beta particle with only 0.2-0.3 mm range and delivers much lower radiation dose to bone marrow compared to ⁹⁰Y. In addition, due to longer physical half-life (compared to ⁹⁰Y), the residence times are higher. As a result, higher activities (more mCi amounts) of ¹⁷⁷Lu labeled agents can be administered with comparatively less radiation dose to marrow. There have been several clinical studies investigating the use of ¹⁷⁷Lu labeled antibodies in the treatment of various cancers. (Mulligan T et al., 1995, Clin. Canc. Res. 1: 1447-1454; Meredith R F, et al., 1996, J. Nucl. Med. 37:1491-1496; Alvarez R D, et al., 1997, Gynecol. Oncol. 65: 94-101).

### Exemplary Diseases and Conditions

[0344] The MMP-9/MMP-2 binding proteins or MMP-9 binding proteins described herein are useful to treat diseases or conditions in which MMP-9 and/or MMP-2 is implicated, e.g., a disease or condition described herein, or to treat one or more symptoms associated therewith. In some embodiments, the MMP-9/MMP-2 binding protein (e.g., MMP-9/MMP-2 binding IgG or Fab) inhibits MMP-9 activity, e.g., catalytic activity, and/or MMP-2 activity, e.g., catalytic activity. In some embodiments, the MMP-9 binding protein (e.g., MMP-9 binding IgG or Fab) inhibits MMP-9 activity, e.g., catalytic activity.

[0345] Examples of such diseases and conditions include a cancer (e.g., metastatic cancer, e.g., metastatic breast cancer), an inflammatory disease (e.g., chronic obstructive pulmonary disease (COPD), asthma, rhinitis (e.g., allergic rhinitis), inflammatory bowel disease, synovitis, rheumatoid arthritis), heart failure, septic shock, neuropathic pain, osteoarthritis, or an ocular condition (e.g., macular degeneration). A therapeutically effective amount of an MMP-9/MMP-2 binding protein or MMP-9 binding protein is administered to a subject having or suspected of having a disorder in which MMP-9 and/or MMP-2 is implicated, thereby treating (e.g., ameliorating or improving a symptom or feature of a disorder, slowing, stabilizing or halting disease progression) the disorder.

[0346] The MMP-9/MMP-2 binding protein or MMP-9 binding protein is administered in a therapeutically effective amount. A therapeutically effective amount of an MMP-9/MMP-2 binding protein or MMP-9 binding protein is the amount which is effective, upon single or multiple dose administration to a subject, in treating a subject, e.g., curing, alleviating, relieving or improving at least one symptom of a disorder in a subject to a degree beyond that expected in the absence of such treatment. A therapeutically effective amount of the composition may vary according to factors such as the disease state, age, sex, and weight of the individual, and the ability of the compound to elicit a desired response in the individual. A therapeutically effective amount is also one in which any toxic or detrimental effects of the composition is outweighed by the therapeutically beneficial effects.

[0347] A therapeutically effective amount can be administered, typically an amount of the compound which is effective, upon single or multiple dose administration to a subject, in treating a subject, e.g., curing, alleviating, relieving or improving at least one symptom of a disorder in a subject to a degree beyond that expected in the absence of such treatment. A therapeutically effective amount of the composition may vary according to factors such as the disease state, age, sex, and weight of the individual, and the ability of the compound to elicit a desired response in the individual. A therapeutically effective amount is also one in which any toxic or detrimental effects of the composition is outweighed by the therapeutically beneficial effects. A therapeutically effective dosage preferably modulates a measurable parameter, favorably, relative to untreated subjects. The ability of a compound to inhibit a measurable parameter can be evaluated in an animal model system predictive of efficacy in a human disorder.

[0348] Dosage regimens can be adjusted to provide the optimum desired response (e.g., a therapeutic response). For example, a single bolus may be administered, several divided doses may be administered over time or the dose may be proportionally reduced or increased as indicated by the exigencies of the therapeutic situation. It is especially advantageous to formulate parenteral compositions in dosage unit form for ease of administration and uniformity of dosage. Dosage unit form as used herein refers to physically discrete units suited as unitary dosages for the subjects to be treated; each unit contains a predetermined quantity of active compound calculated to produce the desired therapeutic effect in association with the required pharmaceutical carrier.

### Cancer

[0349] Matrix metalloproteases (MMPs), such as MMP-9 and MMP-2, are believed to contribute to cancer by cleaving components of the ECM and basement membranes, thereby allowing cancer cells to penetrate and infiltrate the subjacent stromal matrix. Additionally, a number of growth-factor receptors, cell adhesion molecules, chemokines, cytokines, apoptotic ligands, and angiogenic factors are substrates of MMPs. Hence, MMP activity may cause activation of growth factors, suppression of tumor cell apoptosis, destruction of chemokine gradients developed by host immune response, or release of angiogenic factors. MMPs may facilitate tumor growth by promoting the release of cell proliferation factors such as insulin-like growth factors which are bound to specific binding proteins (IGFBPs) (Manes et al., 1997 J. Biol. Chem. 272: 25706-25712).

[0350] Collagenases, including MMP-9 and MMP-2, have been found at elevated levels in melanoma and in cancers of the colon, breast, lung, prostate, and bladder. Usually, these elevated levels correlate with higher tumor grade and invasiveness. MMP-2 levels are significantly elevated in the serum of patients with metastatic lung cancer, and in those patients with high levels, response to chemotherapy is diminished. MMP-9 may contribute to tumor invasiveness and recurrence.

[0351] Accordingly, the disclosure provides methods of treating (e.g., slowing, eliminating, or reversing tumor growth, preventing or reducing, either in number or size, metastases, reducing or eliminating tumor cell invasiveness, providing an increased interval to tumor progression, or increasing disease-free survival time) cancer (e.g., breast cancer, including Her2+, Her2−, ER+, ER−, Her2+/ER+, Her2+/ER−, Her2−/ER+, and Her2−/ER− breast cancer), head and neck cancer, oral cavity cancer, laryngeal cancer, chondrosarcoma, bladder cancer, ovarian cancer, testicular carcinoma, melanoma, brain tumors (e.g., astrocytomas, glioblastomas, gliomas)) by administering an effective amount of an MMP-9/MMP-2 binding protein or MMP-9 binding protein (e.g., an anti-MMP-9/MMP-2 IgG or Fab, or anti-MMP-9 IgG or Fab). In some embodiments, the MMP-9/MMP-2 binding protein inhibits MMP-9 activity and MMP-2 activity. In some embodiments, the MMP-9 binding protein inhibits MMP-9 activity.

[0352] In certain embodiments, the MMP-9/MMP-2 binding protein or MMP-9 binding protein is administered as a single agent treatment. In other embodiments, the MMP-9/MMP-2 binding protein or MMP-9 binding protein is administered in combination with an additional anti-cancer agent.

[0353] Also provided are methods of preventing or reducing risk of developing cancer, by administering an effective amount of an MMP-9/MMP-2 binding protein or MMP-9 binding protein to a subject at risk of developing cancer, thereby reducing the subject's risk of developing a cancer.

[0354] The disclosure further provides methods of modulating (e.g. reducing or preventing) angiogenesis at a tumor site by administering an effective amount of an MMP-9/MMP-2 binding protein or MMP-9 binding protein, thereby reducing or preventing angiogenesis at the tumor site. The MMP-9/MMP-2 binding protein or MMP-9 binding protein may be administered as a single agent therapy or in combination with additional agents.

[0355] Also provided are methods for reducing extracellular matrix (ECM) degradation by a tumor, comprising administering an effective amount of an MMP-9/MMP-2 binding protein or MMP-9 binding protein to a subject, thereby reducing ECM degradation by a tumor in the subject.

[0356] The disclosed methods are useful in the prevention and treatment of solid tumors, soft tissue tumors, and metastases thereof. Solid tumors include malignancies (e.g., sarcomas, adenocarcinomas, and carcinomas) of the various organ systems, such as those of lung, breast, lymphoid, bladder, gastrointestinal (e.g., colon), and genitourinary (e.g., renal, urothelial, or testicular tumors) tracts, pharynx, prostate, and ovary. Exemplary adenocarcinomas include colorectal cancers, renal-cell carcinoma, liver cancer, non-small cell carcinoma of the lung, and cancer of the small intestine. Additional exemplary solid tumors include: fibrosarcoma, myxosarcoma, liposarcoma, chondrosarcoma, osteogenic sarcoma, chordoma, angiosarcoma, endotheliosarcoma, lymphangiosarcoma, lymphangioendotheliosarcoma, synovioma, mesothelioma, Ewing's tumor, leiomyosarcoma, rhabdomyosarcoma, gastrointestinal system carcinomas, colon carcinoma, pancreatic cancer, breast cancer, genitourinary system carcinomas, ovarian cancer, prostate cancer, squamous cell carcinoma, basal cell carcinoma, adenocarcinoma, sweat gland carcinoma, sebaceous gland carcinoma, papillary carcinoma, papillary adenocarcinomas, cystadenocarcinoma, medullary carcinoma, bronchogenic carcinoma, renal cell carcinoma, hepatoma, bile duct carcinoma, choriocarcinoma, seminoma, embryonal carcinoma, Wilms' tumor, cervical cancer, endocrine system carcinomas, testicular tumor, lung carcinoma, small cell lung carcinoma, non-small cell lung carcinoma, bladder carcinoma, epithelial carcinoma, glioma, astrocytoma, medulloblastoma, craniopharyngioma, ependymoma, pinealoma, hemangioblastoma, acoustic neuroma, oligodendroglioma, meningioma, melanoma, neuroblastoma, and retinoblastoma. Metastases of the aforementioned cancers can also be treated or prevented in accordance with the methods described herein.

[0357] Guidance for determination of a therapeutically effective amount for treatment of cancer may be obtained by reference to in vivo models of the cancer to be treated. For example, the amount of an MMP-9/MMP-2 binding protein or MMP-9 binding protein that is a therapeutically effective amount in a rodent or Libechov minipig model of cancer may be used to guide the selection of a dose that is a therapeutically effective amount. A number of rodent models of human cancers are available, including nude mouse/tumor xenograft systems (e.g., melanoma xenografts; see, e.g., Trikha et al. Cancer Research 62:2824-2833 (2002)) and murine models of breast cancer or glioma (e.g., Kuperwasser et al., Cancer Research 65, 6130-6138, (2005); Bradford et al., Br J. Neurosurg. 3(2):197-210 (1989)). A melanoblastoma-bearing Libechov minipig (MeLiM) is available as an animal model of melanoma (e.g., Boisgard et al., Eur J Nucl Med Mol Imaging 30(6):826-34 (2003)).

### Synovitis

[0358] Synovitis is a condition characterized by inflammation of the synovium, a tissue normally only a few cell layers thick. In synovitis, the synovium can become thickened, more cellular, and engorged with fluid. Synovitis can cause pain and inflammation within the affected joint, and is commonly seen in arthritic conditions (e.g., rheumatoid arthritis).

[0359] Active synovial MMP-2 is associated with radiographic erosions in patients with early synovitis (Goldbach-Mansky et al, 2000, Arthritis Res, 2:145-153). Synovial tissue expressions of MMP-2 and TIMP-2 are virtually undetectable in normal synovial tissue samples. The synovial tissue samples of patients with erosive disease have significantly higher levels of active MMP-2 than did those of patients without erosions. This may reflect augmented activation of MMP-2 by increased levels of MMP-9 and low levels of TIMP-2 seen in these tissues. Thus, active MMP-2 can contribute to the development and/or progression of rheumatoid arthritis and osteoarthritis.

[0360] Increased levels of MMP-9 have been found in the synovial fluid in subjects with arthritis (compared with normal individuals). The disclosure provides methods of treating (e.g., ameliorating, stabilizing, reducing, or eliminating a symptom of synovitis such as pain, joint swelling, synovial thickening, increased synovial fluid) synovitis by administering a therapeutically effective amount of an MMP-9/MMP-2 binding protein or MMP-9 binding protein. Also provided are methods which combine MMP-9/MMP-2 binding protein or MMP-9 binding protein therapy with additional therapies. Current therapies for synovitis include anti-inflammatory medications (e.g. NSAIDS and ibuprofen), cortisone injections into the joint, and surgical treatment (e.g., synovectomy). One or more of these treatments can be used in combination with an MMP-9/MMP-2 binding protein (e.g., an inhibitory MMP-9/MMP-2 binding protein or MMP-9 binding protein, e.g., an anti-MMP-9/MMP-2 IgG or Fab, or anti-MMP-9 IgG or Fab) to treat this condition.

[0361] Guidance for determination of a therapeutically effective amount of an MMP-9/MMP-2 binding protein may be obtained from an animal model of synovitis. Rodent models of synovitis are available, including a rat model of synovitis-like inflammation (Cirino et al., J. Rheumatol. 21(5):824-9 (1994)), and a model of carrageenan synovitis in male Wistar rats (Walsh et al. Lab Invest. 78(12): 1513-21 (1998)).

### Rheumatoid Arthritis and Associated Conditions

[0362] Rheumatoid arthritis (RA) is an autoimmune, chronic inflammatory disease that causes joint swelling and pain and normally results in joint destruction. RA generally follows a relapsing/remitting course, with “flares” of disease activity interspersed with remissions of disease symptoms. RA is associated with a number of additional inflammatory disorders, including Sjogren's syndrome (dry eyes and mouth caused by inflammation of tear and saliva glands), pleuritis (inflammation of the pleura that causes pain upon deep breath and coughing), rheumatoid nodules (nodular sites of inflammation that develop within the lungs), pericarditis (inflammation of the pericardium that causes pain when lying down or leaning forward), Felty syndrome (splenomegaly and leucopenia observed in conjunction with RA, making the subject prone to infection), and vasculitis (an inflammation of the blood vessels which can block blood flow). MMP-2, MMP-9 and MMP-16 have been implicated in rheumatoid arthritis.

[0363] Symptoms of active RA include fatigue, lack of appetite, low grade fever, muscle and joint aches, and stiffness. Muscle and joint stiffness are usually most notable in the morning and after periods of inactivity. During flares, joints frequently become red, swollen, painful, and tender, generally as a consequence of synovitis.

[0364] Treatment for rheumatoid arthritis involves a combination of medications, rest, joint strengthening exercises, and joint protection. Two classes of medications are used in treating rheumatoid arthritis: anti-inflammatory “first-line drugs,” and Disease-Modifying Antirheumatic Drugs (DMARDs).” The first-line drugs, include NSAIDS (e.g., aspirin, naproxen, ibuprofen, and etodolac) and cortisone (corticosteroids). DMARDS, such as gold (e.g., gold salts, gold thioglucose, gold thiomalate, oral gold), methotrexate, sulfasalazine, D-penicillamine, azathioprine, cyclophosphamide, chlorambucil, and cyclosporine, leflunomide, etanercept, infliximab, anakinra, and adalimumab, and hydroxychloroquine, promote disease remission and prevent progressive joint destruction, but they are not anti-inflammatory agents.

[0365] Increased levels of MMP-9 have been found in the synovial fluid in subjects with arthritis (compared with normal individuals). The disclosure provides methods of treating (e.g., ameliorating, stabilizing, or eliminating one or more symptoms or ameliorating or stabilizing the subject's score on a RA scale) rheumatoid arthritis by administering a therapeutically effective amount of an MMP-9/MMP-2 binding protein or MMP-9 binding protein to a subject having or suspected of having RA. Additionally provides are methods of treating RA by administering a therapeutically effective amount of an MMP-9/MMP-2 binding protein or MMP-9 binding protein and at least one NSAID and/or DMARDS.

[0366] Further provided are methods of treating (e.g., ameliorating, stabilizing, or eliminating one or more symptoms) rheumatoid arthritis associated disorders (Sjogren's syndrome, pleuritis, pulmonary rheumatoid nodules, pericarditis, Felty syndrome, and vasculitis) by administering a therapeutically effective amount of an MMP-9/MMP-2 binding protein or MMP-9 binding protein.

[0367] Scales useful for assessing RA and symptoms of RA include the Rheumatoid Arthritis Severity Scale (RASS; Bardwell et al., (2002) Rheumatology 41(1):38-45), SF-36 Arthritis Specific Health Index (ASHI; Ware et al., (1999) Med. Care. 37(5 Suppl):MS40-50), Arthritis Impact Measurement Scales or Arthritis Impact Measurement Scales 2 (AIMS or AIMS2; Meenan et al. (1992) Arthritis Rheum. 35(1):1-10); the Stanford Health Assessment Questionnaire (HAQ), HAQII, or modified HAQ (see, e.g., Pincus et al. (1983) Arthritis Rheum. 26(11):1346-53).

[0368] Guidance for the determination of the dosage that delivers a therapeutically effective amount of an MMP-9/MMP-2 binding protein or MMP-9 binding protein may be obtained from animal models of rheumatoid arthritis, such as collagen-induced arthritis (CIA), which is induced, typically in rodents, by immunization with autologous or heterologous type II collagen in adjuvant (Williams et al. Methods Mol. Med. 98:207-16 (2004)).

### COPD

[0369] Chronic Obstructive Pulmonary Disease (COPD), also known as chronic obstructive airway disease (COAD), is a group of diseases characterized by the pathological limitation of airflow in the airway that is not fully reversible. COPD is the umbrella term for chronic bronchitis, emphysema and a range of other lung disorders. It is most often due to tobacco smoking, but can be due to other airborne irritants such as coal dust, asbestos or solvents, as well as congenital conditions such as alpha-1-antitrypsin deficiency.

[0370] The main symptoms of COPD include dyspnea (shortness of breath) lasting for months or perhaps years, possibly accompanied by wheezing, and a persistent cough with sputum production. It is possible the sputum may contain blood (hemoptysis) and become thicker, usually due to damage of the blood vessels of the airways. Severe COPD could lead to cyanosis caused by a lack of oxygen in the blood. In extreme cases it could lead to cor pulmonale due to the extra work required by the heart to get blood to flow through the lungs.

[0371] COPD is particularly characterised by the spirometric measurement of a ratio of forced expiratory volume over 1 second (FEV₁) to forced vital capacity (FVC) being <0.7 and the FEV₁ <80% of the predicted value as measured by a plethysmograph. Other signs include a rapid breathing rate (tachypnea) and a wheezing sound heard through a stethoscope Pulmonary emphysema is NOT the same as subcutaneous emphysema, which is a collection of air under the skin that may be detected by the crepitus sounds produced on palpation.

[0372] Treatment for COPD includes inhalers that dilate the airways (bronchodilators) and sometimes theophylline. The COPD patient must stop smoking. In some cases inhaled steroids are used to suppress lung inflammation, and, in severe cases or flare-ups, intravenous or oral steroids are given. Antibiotics are used during flare-ups of symptoms as infections can worsen COPD. Chronic, low-flow oxygen, non-invasive ventilation, or intubation may be needed in some cases. Surgery to remove parts of the disease lung has been shown to be helpful for some patients with COPD. Lung rehabilitation programs may help some patients. Lung transplant is sometimes performed for severe cases. Bronchodilators that can be used include:

[0373] There are several types of bronchodilators used clinically with varying efficacy: for example, β₂ agonists, M₃ antimuscarinics, leukotriene antagonists, cromones, corticosteroids, and xanthines. These drugs relax the smooth muscles of the airway allowing for improved airflow. β₂ agonists include: Salbutamol (Ventolin), Bambuterol, Clenbuterol, Fenoterol, and Formoterol, and long acting β₂ agonists (LABAs) such as Salmeterol. M₃ muscarinic antagonists (anticholinergics) include the quaternary M₃ muscarinic antagonist Ipratropium, which is widely prescribed with the β₂ agonist salbutamol, Ipratropium, and Tiotropium, which can be combined with a LABA and inhaled steroid. Cromones include Cromoglicate and Nedocromil. Leukotriene antagonists can be used and include Montelukast, Pranlukast, Zafirlukast. Xanthines include theophylline, methylxanthines, theobromine. More aggressive EMR interventions include IV H₁ antihistamines and IV dexamethasone. Phosphodiesterase-4 antagonists include roflumilast and cilomilast. Corticosteroids can be used and include glucocorticoids, beclomethasone, mometasone, and fluticasone. Corticosteroids are often combined with bronchodilators in a single inhaler. Salmeterol and fluticasone can be combined (Advair). TNF antagonists include cachexin, cachectin infliximab, adalimumab and etanercept.

[0374] The disclosure provides methods of treating COPD (e.g., ameliorating symptoms or the worsening of COPD) by administering a therapeutically effective amount of an MMP-9/MMP-2 binding protein or MMP-9 binding protein (e.g., an inhibitory MMP-9/MMP-2 binding protein or inhibitory MMP-9 binding protein, e.g., an anti-MMP-9/MMP-2 IgG or Fab, or anti-MMP-9 IgG or Fab) to a subject having or suspected of having COPD. Also provided are methods of treating COPD by administering a therapeutically effective amount of an MMP-9/MMP-2 binding protein or MMP-9 binding protein with another COPD treatment (e.g., β₂ agonists, M₃ antimuscarinics, leukotriene antagonists, cromones, corticosteroids, and xanthines).

[0375] Guidance regarding the efficacy and dosage an MMP-9/MMP-2 binding protein or MMP-9 binding protein which will deliver a therapeutically effective amount of the protein can be obtained from an animal model of COPD, see e.g., PCT publication WO 2007/084486 and references cited therein.

### Asthma

[0376] Asthma is a chronic condition involving the respiratory system in which the airway occasionally constricts, becomes inflamed, and is lined with excessive amounts of mucus, often in response to one or more triggers. These episodes may be triggered by such things as exposure to an environmental stimulant (or allergen) such as cold air, warm air, moist air, exercise or exertion, or emotional stress. In children, the most common triggers are viral illnesses such as those that cause the common cold. This airway narrowing causes symptoms such as wheezing, shortness of breath, chest tightness, and coughing. The airway constriction responds to bronchodilators.

[0377] In some individuals asthma is characterized by chronic respiratory impairment. In others it is an intermittent illness marked by episodic symptoms that may result from a number of triggering events, including upper respiratory infection, stress, airborne allergens, air pollutants (such as smoke or traffic fumes), or exercise. Some or all of the following symptoms may be present in those with asthma: dyspnea, wheezing, stridor, coughing, an inability for physical exertion. Some asthmatics who have severe shortness of breath and tightening of the lungs never wheeze or have stridor and their symptoms may be confused with a COPD-type disease.

[0378] An acute exacerbation of asthma is commonly referred to as an asthma attack. The clinical hallmarks of an attack are shortness of breath (dyspnea) and either wheezing or stridor.

[0379] During an asthma episode, inflamed airways react to environmental triggers such as smoke, dust, or pollen. The airways narrow and produce excess mucus, making it difficult to breathe. In essence, asthma is the result of an immune response in the bronchial airways.

[0380] The airways of asthmatics are “hypersensitive” to certain triggers/stimuli. In response to exposure to these triggers, the bronchi (large airways) contract into spasm (an “asthma attack”). Inflammation soon follows, leading to a further narrowing of the airways and excessive mucus production, which leads to coughing and other breathing difficulties.

[0381] The most effective treatment for asthma is identifying triggers, such as pets or aspirin, and limiting or eliminating exposure to them. Desensitization is currently the only known “cure” to the disease.

[0382] Symptomatic control of episodes of wheezing and shortness of breath is generally achieved with fast-acting bronchodilators.

[0383] Relief medication: Short-acting, selective beta₂-adrenoceptor agonists, such as salbutamol (albuterol USAN), levalbuterol, terbutaline and bitolterol, can be used. Older, less selective adrenergic agonists, such as inhaled epinephrine and ephedrine tablets, can be used. Anticholinergic medications, such as ipratropium bromide may be used.

[0384] Preventative medication: Current treatment protocols recommend prevention medications such as an inhaled corticosteroid, which helps to suppress inflammation and reduces the swelling of the lining of the airways, in anyone who has frequent (greater than twice a week) need of relievers or who has severe symptoms. If symptoms persist, additional preventive drugs are added until the asthma is controlled. With the proper use of prevention drugs, asthmatics can avoid the complications that result from overuse of relief medications. Preventive agents include: inhaled glucocorticoids (e.g., ciclesonide, beclomethasone, budesonide, flunisolide, fluticasone, mometasone, and triamcinolone), leukotriene modifiers (e.g., montelukast, zafirlukast, pranlukast, and zileuton), mast cell stabilizers (e.g., cromoglicate (cromolyn), and nedocromil), antimuscarinics/anticholinergics (e.g., ipratropium, oxitropium, and tiotropium), methylxanthines (e.g., theophylline and aminophylline), antihistamines, an IgE blocker such as omalizumab, methotrexate).

[0385] Long-acting beta₂-adrenoceptor agonists can be used and include salmeterol, formoterol, bambuterol, and sustained-release oral albuterol. Combinations of inhaled steroids and long-acting bronchodilators are becoming more widespread; the most common combination currently in use is fluticasone/salmeterol (Advair in the United States, and Seretide in the United Kingdom). Another combination is budesonide/formoterol which is commercially known as Symbicort.

[0386] Concentrations of MMP-9 are increased in the bronchoalveolar lavage fluid (BAL), sputum, bronchi, and serum of asthmatic subjects compared with normal indivuduals. The disclosure provides methods of treating asthma (e.g., ameliorating symptoms or the worsening of asthma) by administering a therapeutically effective amount of an MMP-9/MMP-2 binding protein or MMP-9 binding protein (e.g., an inhibitory MMP-9/MMP-2 binding protein or inhibitory MMP-9 binding protein, e.g., an anti-MMP-9/MMP-2 IgG or Fab, or anti-MMP-9 IgG or Fab) to a subject having or suspected of having asthma. Also provided are methods of treating asthma by administering a therapeutically effective amount of an MMP-9/MMP-2 binding protein or MMP-9 binding protein with another asthma treatment (e.g., glucocorticoids, leukotriene modifiers, mast cell stabilizers, antimuscarinics/anticholinergics, antihistamines, an IgE blocker, methotrexate.

[0387] Guidance regarding the efficacy and dosage an MMP-9/MMP-2 binding protein or MMP-9 binding protein which will deliver a therapeutically effective amount of the protein can be obtained from an animal model of asthma, see e.g., U.S. Pat. No. 5,602,302, or European Pat. No. EP1192944 B1, and references cited therein.

### Rhinitis

[0388] Rhinitis is the medical term describing irritation and inflammation of some internal areas of the nose. The primary symptom of rhinitis is a runny nose. It is caused by chronic or acute inflammation of the mucous membrane of the nose due to viruses, bacteria or irritants. The inflammation results in the generating of excessive amounts of mucus producing a runny nose, nasal congestion and post-nasal drip. Rhinitis has also been found to adversely affect more than just the nose, throat, and eyes. It has been associated with sleeping problems, problems with the ears, and even been linked to learning problems Rhinitis is caused by an increase in histamine. This increase is likely caused by airborne allergens. These allergens may affect an individual's nose, throat, or eyes and cause an increase in fluid production within these areas. There are two types of Rhinitis that the general population may suffer from: allergic rhinitis and nonallergic rhinitis. Rhinitis is considered IgE-mediated when the sufferer is classified as having allergic rhinitis.

[0389] The typical method of diagnosis and monitoring of allergic rhinitis is skin testing, also known as “scratch testing” and “prick testing” due to the series of pricks and/or scratches made into the patient's skin. Small amounts of suspected allergens and/or their extracts (pollen, grass, mite proteins, peanut extract, etc.) are introduced to sites on the skin marked with pen or dye.

[0390] The management of rhinitis is mainly medical. Treatment for seasonal rhinitis is only needed during the appropriate time of the year. Current treatments include: antihistamine pills and sprays, leukotriene antagonists, nasal corticosteroid sprays, decongestant pills or sprays, allergen immunotherapy, saline irrigation of sinus cavities through the use of a neti pot or by other means; nasal obstruction in perennial rhinitis may be treated by surgery.

[0391] The disclosure provides methods of treating rhinitis (e.g., allergic rhinitis) (e.g., ameliorating symptoms or the worsening of rhinitis) by administering a therapeutically effective amount of an MMP-9/MMP-2 binding protein or MMP-9 binding protein (e.g., an inhibitory MMP-9/MMP-2 binding protein or inhibitory MMP-9 binding protein, e.g., an anti-MMP-9/MMP-2 IgG or Fab, or anti-MMP-9 IgG or Fab) to a subject having or suspected of having rhinitis. Also provided are methods of treating rhinitis by administering a therapeutically effective amount of an MMP-9/MMP-2 binding protein or MMP-9 binding protein with another rhinitis treatment (e.g., β₂ agonists, M₃ antimuscarinics, leukotriene antagonists, cromones, corticosteroids, and xanthines).

[0392] Guidance regarding the efficacy and dosage an MMP-9/MMP-2 binding protein or MMP-9 binding protein which will deliver a therapeutically effective amount of the protein can be obtained from an animal model of rhinitis, see e.g., Zhao et al. (2005) Rhinology 43:47-54, and references cited therein.

### IBD

[0393] Inflammatory bowel disease (IBD) is a group of inflammatory conditions of the large intestine and, in some cases, the small intestine. The main forms of IBD are Crohn's disease and ulcerative colitis (UC). Accounting for far fewer cases are other forms of IBD: Collagenous colitis, Lymphocytic colitis, Ischaemic colitis, Diversion colitis, Behçet's syndrome, Infective colitis, and Indeterminate colitis.

[0394] The main difference between Crohn's disease and UC is the location and nature of the inflammatory changes. Crohn's can affect any part of the gastrointestinal tract, from mouth to anus (skip lesions), although a majority of the cases start in the terminal ileum. Ulcerative colitis, in contrast, is restricted to the colon and the rectum.

[0395] Microscopically, ulcerative colitis is restricted to the mucosa (epithelial lining of the gut), while Crohn's disease affects the whole bowel wall.

[0396] Finally, Crohn's disease and ulcerative colitis present with extra-intestinal manifestations (such as liver problems, arthritis, skin manifestations and eye problems) in different proportions.

[0397] Rarely, a definitive diagnosis of neither Crohn's disease nor ulcerative colitis can be made because of idiosyncrases in the presentation. In this case, a diagnosis of indeterminate colitis may be made.

[0398] Diagnosis: Although very different diseases, both may present with any of the following symptoms: abdominal pain, vomiting, diarrhea, hematochezia, weight loss, weight gain and various associated complaints or diseases (arthritis, pyoderma gangrenosum, primary sclerosing cholangitis). Diagnosis is generally by colonoscopy with biopsy of pathological lesions.

[0399] Treatment: Depending on the level of severity, IBD may require immunosuppression to control the symptoms. Immunosuppresives such as azathioprine, methotrexate, or 6-mercaptopurine can be used. More commonly, treatment of IBD requires a form of mesalamine. Often, steroids are used to control disease flares and were once acceptable as a maintenance drug. In use for several years in Crohns disease patients and recently in patients with Ulcerative Colitis, biologicals, such as Remicade, have been used. Severe cases may require surgery, such as bowel resection, strictureplasty or a temporary or permanent colostomy or ileostomy. Alternative medicine treatments for bowel disease exist in various forms, however such methods concentrate on controlling underlying pathology in order to avoid prolonged steroidal exposure or surgical excisement.

[0400] Usually the treatment is started by administering drugs, such as Prednisone, with high anti-inflammatory affects. Once the inflammation is successfully controlled, the patient is usually switched to a lighter drug, such as Asacol—a mesalamine, to keep the disease in remission. If unsuccessful, a combination of the aforementioned immunosurpression drugs with a mesalamine (which may also have an anti-inflammatory effect) may or may not be administered, depending on the patient.

[0401] The disclosure provides methods of treating IBD (e.g., ameliorating symptoms or the worsening of IBD) by administering a therapeutically effective amount of an MMP-9/MMP-2 binding protein or MMP-9 binding protein (e.g., an inhibitory MMP-9/MMP-2 binding protein or inhibitory MMP-9 binding protein, e.g., an anti-MMP-9/MMP-2 IgG or Fab, or anti-MMP-9 IgG or Fab) to a subject having or suspected of having IBD. Also provided are methods of treating IBD by administering a therapeutically effective amount of an MMP-9/MMP-2 binding protein or MMP-9 binding protein with another IBD treatment (e.g., azathioprine, methotrexate, 6-mercaptopurine, a mesalamine, Remicade).

[0402] Guidance regarding the efficacy and dosage an MMP-9/MMP-2 binding protein or MMP-9 binding protein which will deliver a therapeutically effective amount of the protein can be obtained from animal models of IBD, see e.g., those described in U.S. Pat. No. 6,114,382, PCT publication WO 2004/071186 and references cited therein.

### Ocular Conditions

[0403] Macular Degeneration. Macular degeneration progressively destroys the macula, the central portion of the retina, impairing central vision, leading to difficulty with reading, driving, and/or other daily activities that require fine central vision. While there are a number of different forms of macular degeneration, the most common is age-related macular degeneration (AMD). AMD presents as either “dry” or “wet”, with the wet type being far more common. In wet AMD, fluid leaking from newly formed subretinal blood vessels (subretinal neovascularization) distorts the macula and impairs vision. Symptoms of AMD include loss or impairment in central vision (generally slowing in dry AMD and rapidly in wet AMD) and abnormal visual perception of straight lines (e.g., straight lines appear wavy). Supplements of zinc and the antioxidants vitamin C, vitamin E and beta-carotene reportedly slow the progression of wet AMD.

[0404] The disclosure provides methods of treating (e.g., ameliorating vision, stabilizing vision degradation, or reducing the rate of vision degradation) AMD (wet AMD or dry AMD) by administering a therapeutically effective amount of an MMP-9/MMP-2 binding protein or MMP-9 binding protein (e.g., an inhibitory MMP-9/MMP-2 binding protein or inhibitory MMP-9 binding protein, e.g., an anti-MMP-9/MMP-2 IgG or Fab, or anti-MMP-9 IgG or Fab) to a subject having or suspected of having AMD. Also provided are methods of treating AMD by administering a therapeutically effective amount of an MMP-9/MMP-2 binding protein or MMP-9 binding protein with another AMD treatment (e.g., zinc, vitamin C, vitamin E and/or beta-carotene).

[0405] Guidance regarding the efficacy and dosage an MMP-9/MMP-2 binding protein or MMP-9 binding protein which will deliver a therapeutically effective amount of the protein can be obtained from an animal model of macular degeneration, e.g., a Coturnix coturnix japonica (Japanese quail) model of macular degeneration (U.S. Pat. No. 5,854,015), or wound creation on the Bruch's membrane of a C57BL/6J mouse, e.g., with a krypton laser (US App. No. 20030181531).

[0406] Corneal Disease. Keratoconus is a progressive disease where the cornea thins and changes shape. The resulting distortion (astigmatism) frequently causes nearsightedness. Keratoconus may also cause swelling and scarring of the cornea and vision loss.

[0407] The disclosure provides methods of treating (e.g., improving or stabilizing vision, or improving, stabilizing, reducing eliminating, or preventing corneal scarring) keratoconus in a subject having or suspected of having keratoconus by administering an effective amount of an MMP-9/MMP-2 binding protein or MMP-9 binding protein (e.g., an inhibitory MMP-9/MMP-2 binding protein or inhibitory MMP-9 binding protein, e.g., an anti-MMP-9/MMP-2 IgG or Fab, or anti-MMP-9 IgG or Fab).

[0408] Guidance regarding the efficacy and dosage an MMP-9/MMP-2 binding protein or MMP-9 binding protein which will deliver a therapeutically effective amount of the protein can be obtained from an animal model of keratoconus, e.g., the inbred SKC mouse line, which serves as a model for a subset of keratoconus (Tachibana et al. Investig Ophthalmol Visual Sci, 43:51-57 (2002)).

[0409] Corneal Infection. Also provided are methods of treating (e.g., preventing, reducing, stabilizing or eliminating corneal scarring as a result of the infection) corneal infection by administering an effective amount of an MMP-9/MMP-2 binding protein or MMP-9 binding protein (e.g., an inhibitory MMP-9/MMP-2 binding protein or inhibitory MMP-9 binding protein, e.g., an anti-MMP-9/MMP-2 IgG or Fab, or anti-MMP-9 IgG or Fab) to a subject having or suspected of having a corneal infection. Additionally, methods are provided for treatment of corneal infection by administering an MMP-9/MMP-2 binding protein or MMP-9 binding protein and a therapeutic agent which treats the infectious agent (e.g., an antibiotic or anti-viral agent).

[0410] Guidance regarding the efficacy and dosage an MMP-9/MMP-2 binding protein or MMP-9 binding protein which will deliver a therapeutically effective amount of the protein can be obtained from an animal model of corneal infection, e.g., a rabbit model of experimental keratomycosis, in which keratitis is induced with a standardized inoculum of Candida albicans (SC 5314) placed on a debrided cornea (Goldblum et al. Antimicrob Agents Chemother 49:1359-1363 (2005)).

### Osteoarthritis

[0411] Osteoarthritis, also known as degenerative arthritis, is characterized by the breakdown and eventual loss of the cartilage of one or more joints. Osteoarthritis commonly affects the hands, feet, spine, and large weight-bearing joints, such as the hips and knees. The disclosure provides methods of treating (e.g., stabilizing, reducing, or eliminating joint pain, stabilizing or improving performance on general health or osteoarthritis scales) osteoarthritis by administering a therapeutically effective amount of an MMP-9/MMP-2 binding protein or MMP-9 binding protein (e.g., an inhibitory MMP-9/MMP-2 binding protein or inhibitory MMP-9 binding protein, e.g., an anti-MMP-9/MMP-2 IgG or Fab, or anti-MMP-9 IgG or Fab) to a subject having or suspected of having osteoarthritis.

[0412] Current medical treatment of osteoarthritis includes conservative measures (e.g., rest, weight reduction, physical and occupational therapy) and medications such as acetaminophen, pain-relieving creams applied to the skin over the joints such as capsaicin, salycin, methyl salicylate, and menthol, nonsteroidal anti-inflammatory drugs (NSAIDs) such as aspirin, ibuprofen, nabumetone, and naproxen, and Cox-2 inhibitors. The disclosure further provides methods of treating osteoarthritis by administering a therapeutically effective amount of an MMP-9/MMP-2 binding protein or MMP-9 binding protein (e.g., an inhibitory MMP-9/MMP-2 binding protein or inhibitory MMP-9 binding protein, e.g., an anti-MMP-9/MMP-2 IgG or Fab, or anti-MMP-9 IgG or Fab) and another osteoarthritis therapy (e.g. acetaminophen, a topical pain-relieving cream, a nonsteroidal anti-inflammatory drug (NSAID) such as aspirin, ibuprofen, nabumetone, or naproxen, or a Cox-2 inhibitor).

[0413] Scales useful for the assessment of osteoarthritis include the Knee Injury and Osteoarthritis Outcome Score (KOOS; Roos et al. (1998) J. Orthop. Sports Phys. Ther. 28(2):88-96), Western Ontario and McMaster Universities Osteoarthrtis Index (WOMAC; Roos et al. (2003) Health Qual. Life Outcomes 1(1):17), and the 36-item Short Form General Health Scale (SF-36 GHS), as well as other assessment tools known in the art.

[0414] Guidance regarding the efficacy and dosage an MMP-9/MMP-2 binding protein or MMP-9 binding protein which will deliver a therapeutically effective amount of the protein can be obtained from an animal model of osteoarthritis, e.g., injection of mono-iodoacetate (MIA) into the femorotibial joint of rodents which promotes loss of articular cartilage similar to that noted in human osteoarthritis (Guzman et al. Toxicol Pathol. 31(6):619-24 (2003)), or transection of the anterior cruciate ligament (ACL) in canines to induce osteoarthritis (Fife and Brandt J Clin Invest. 84(5): 1432-1439 (1989)).

### Heart Failure

[0415] Heart failure is caused by any condition which reduces the efficiency of the myocardium, or heart muscle, through damage or overloading. As such, it can be caused by as diverse an array of conditions as myocardial infarction, hypertension and amyloidosis. Over time these increases in workload will produce changes to the heart itself. Congestive heart failure (CHF), congestive cardiac failure (CCF) or just heart failure, is a condition that can result from any structural or functional cardiac disorder that impairs the ability of the heart to fill with or pump a sufficient amount of blood through the body.

[0416] Other related terms include ischemic cardiomyopathy (implying that the cause of heart failure is coronary artery disease) and dilated cardiomyopathy (which is a description of echocardiographic findings characteristic of heart failure but which does not suggest any specific etiology).

[0417] Congestive heart failure exacerbation or decompensated heart failure (DHF) refer to episodes in which a patient with known chronic heart failure acutely develops symptoms.

[0418] Symptoms are dependent on two factors. The first is based on the side of the heart, right or left, that is involved. The second factor is based on the type of failure, either diastolic or systolic. Symptoms and presentation may be indistinguishable making diagnosis impossible based on symptoms.

[0419] Given that the left side of the heart pumps blood from the lungs to the organs, failure to do so leads to congestion of the lung veins and symptoms that reflect this, as well as reduced supply of blood to the tissues. The predominant respiratory symptom is shortness of breath on exertion (dyspnea, dyspnée d'effort)—or in severe cases at rest—and easy fatigueability. Orthopnea is increasing breathlessness on reclining. Paroxysmal nocturnal dyspnea is a nighttime attack of severe breathlessness, usually several hours after going to sleep. Poor circulation to the body leads to dizziness, confusion and diaphoresis and cool extremities at rest.

[0420] The right side of the heart pumps blood returned from the tissues to the lungs to exchange CO₂ for O₂. Hence, failure of the right side leads to congestion of peripheral tissues. This may lead to peripheral edema or anasarca and nocturia. In more severe cases, ascites and hepatomegaly may develop.

[0421] Heart failure may decompensate easily; this may occur as the result of any intercurrent illness (such as pneumonia), but specifically myocardial infarction, anaemia, hyperthyroidism or arrhythmias. These place additional strain on the heart muscle, which may cause symptoms to rapidly worsen. Excessive fluid or salt intake (including intravenous fluids for unrelated indications, but more commonly from dietary indiscretion), and medication that causes fluid retention (such as NSAIDs and thiazolidinediones), may also precipitate decompensation.

[0422] In examining a patient with possible heart failure, a health professional would look for particular signs. General signs indicating heart failure are a laterally displaced apex beat (as the heart is enlarged) and a gallop rhythm (additional heart sounds) in case of decompensation. Heart murmurs may indicate the presence of valvular heart disease, either as a cause (e.g. aortic stenosis) or as a result (e.g. mitral regurgitation) of the heart failure.

[0423] Predominant left-sided clinical signs are tachypnea and increased work of breathing (signs of respiratory distress not specific to heart failure), rales or crackles, which suggests the development of pulmonary edema, dullness of the lung fields to percussion and diminished breath sounds at the bases of the lung, which suggests the development of a pleural effusion (fluid collection in the pleural cavity) that is transudative in nature, and cyanosis which suggests hypoxemia, caused by the decreased rate of diffusion of oxygen from fluid-filled alveoli to the pulmonary capillaries.

[0424] Right-sided signs are peripheral edema, ascites and hepatomegaly, an increased jugular venous pressure, which can be increased further by the hepatojugular reflux, and a parasternal heave.

[0425] Causes of left-side heart failure include: hypertension (high blood pressure), aortic and mitral valve disease, aortic coarctation. Causes of right-side heart failure include pulmonary hypertension (e.g. due to chronic lung disease), pulmonary or tricuspid valve disease. Causes of both types include: Ischemic heart disease (due to insufficient vascular supply, usually as a result of coronary artery disease); this may be chronic or due to acute myocardial infarction (a heart attack), chronic arrhythmias (e.g. atrial fibrillation), cardiomyopathy of any cause, cardiac fibrosis, chronic severe anemia, thyroid disease (hyperthyroidism and hypothyroidism).

[0426] Treatments of heart failure include: moderate physical activity, bed rest, weight reduction, monitoring weight, sodium restriction, fluid restriction, diuretic agents, vasodilator agents, positive inotropes, ACE inhibitors, beta blockers, and aldosterone antagonists (e.g., spironolactone), angiotensin II receptor antagonist therapy (also referred to as AT₁-antagonists or angiotensin receptor blockers) (particularly using candesartan). Diuretics include loop diuretics (e.g., furosemide, bumetanide), thiazide diuretics (e.g., hydrochlorothiazide, chlorthalidone, chlorthiazide), potassium-sparing diuretics (e.g., amiloride), spironolactone, eplerenone. Beta blockers include bisoprolol, carvedilol, and extended-release metoprolol. Positive inotropes include digoxin, dobutamine. Phosphodiesterase inhibitors such as milrinone are sometimes utilized in severe cardiomyopathy. Alternative vasodilators include the combination of isosorbide dinitrate/hydralazine. Aldosterone receptor antagonists include spironolactone and the related drug eplerenone. Recombinant neuroendocrine hormones can also be used and include Nesiritide, a recombinant form of B-natriuretic peptide. Vasopressin receptor antagoniststhat can be used include tolvaptan and conivaptan. Devices and surgery options include cardiac resynchronization therapy (CRT; pacing both the left and right ventricles), through implantation of an bi-ventricular pacemaker, or surgical remodelling of the heart, an implantable cardioverter-defibrillator (ICD), left ventricular assist devices (LVADs).

[0427] The disclosure provides methods of treating heart failure (e.g., ameliorating symptoms or the worsening of heart failure) by administering a therapeutically effective amount of an MMP-9/MMP-2 binding protein or MMP-9 binding protein (e.g., an inhibitory MMP-9/MMP-2 binding protein or inhibitory MMP-9 binding protein, e.g., an anti-MMP-9/MMP-2 IgG or Fab, or anti-MMP-9 IgG or Fab) to a subject having or suspected of having heart failure. Also provided are methods of treating heart failure by administering a therapeutically effective amount of an MMP-9/MMP-2 binding protein or MMP-9 binding protein with another heart failure treatment (e.g., a diuretic agent, a vasodilator agent, a positive inotrope, an ACE inhibitor, a beta blocker, and an aldosterone antagonist (e.g., spironolactone), angiotensin II receptor antagonist therapy (also referred to as AT₁-antagonists or angiotensin receptor blockers)).

[0428] Guidance regarding the efficacy and dosage an MMP-9/MMP-2 binding protein or MMP-9 binding protein which will deliver a therapeutically effective amount of the protein can be obtained from an animal model of heart failure, see e.g., U.S. Pat. No. 7,166,762 and references cited therein.

### Septic Shock

[0429] Septic shock is a serious medical condition caused by decreased tissue perfusion and oxygen delivery as a result of infection and sepsis. It can cause multiple organ failure and death. Its most common victims are children, immunocompromised individuals, and the elderly, as their immune systems cannot cope with the infection as well as healthy adults are able. The mortality rate from septic shock is approximately 50%.

[0430] Symptoms include: Refractory hypotension-hypotension despite adequate fluid resuscitation. In adults it is defined as a systolic blood pressure <90 mmHg, or a MAP <60 mmHg, without the requirement for inotropic support, or a reduction of 40 mmHg in the systolic blood pressure from baseline. In children, it is BP <2 SD of the normal blood pressure. In addition to the two criteria above, two or more of the following can be present: Hyperventilation (high respiratory rate)>20 breaths per minute or, on blood gas, a PₐCO₂ less than 32 mmHg, and/or White blood cell count <4000 cells/mm³ or >12000 cells/mm³ (<4×10⁹ or >12×10⁹ cells/L).

[0431] A subclass of distributive shock, shock refers specifically to decreased tissue perfusion resulting in end-organ dysfunction. Cytokines TNFα, IL-1β, IL-6 released in a large scale inflammatory response results in massive vasodilation, increased capillary permeability, decreased systemic vascular resistance, and hypotension. Hypotension reduces tissue perfusion pressure and thus tissue hypoxia ensues. Finally, in an attempt to offset decreased blood pressure, ventricular dilatation and myocardial dysfunction will occur.

[0432] The process of infection by bacteria or fungi can result in systemic signs and symptoms that are variously described. In rough order of severity, these are bacteremia or fungemia; septicemia; sepsis, severe sepsis or sepsis syndrome; septic shock; refractory septic shock; multiple organ dysfunction syndrome, and death.

[0433] The condition develops as a response to certain microbial molecules which trigger the production and release of cellular mediators, such as tumor necrosis factors (TNF); these act to stimulate immune response. Besides TNFα, other cytokines involved in the development of septic shock include interleukin-1β, and interferon γ.

[0434] Treatment primarily consists of 1) Volume resuscitation 2) Early antibiotic administration 3) Rapid source identification and control and 4) Support of major organ dysfunction. Among the choices for pressors, norepinephrine (optionally plus dobutamine as needed for cardiac output) or epinephrine can be used. Antimmediator agents may be of some limited use in severe clinical situations: Corticosteroids, especially if combined with a mineralocorticoid, can reduce mortality among patients who have relative adrenal insufficiency; or recombinant activated protein C (drotrecogin alpha). A sophorolipid mixture can be used.

[0435] The disclosure provides methods of treating septic shock by administering a therapeutically effective amount of an MMP-9/MMP-2 binding protein or MMP-9 binding protein (e.g., an inhibitory MMP-9/MMP-2 binding protein or inhibitory MMP-9 binding protein, e.g., an anti-MMP-9/MMP-2 IgG or Fab, or anti-MMP-9 IgG or Fab) to a subject having or suspected of having septic shock. Also provided are methods of treating septic shock by administering a therapeutically effective amount of an MMP-9/MMP-2 binding protein or MMP-9 binding protein with another septic shock treatment (e.g., corticosteroid, sophorolipid mixture, or antibiotics).

[0436] Guidance regarding the efficacy and dosage an MMP-9/MMP-2 binding protein or MMP-9 binding protein which will deliver a therapeutically effective amount of the protein can be obtained from an animal model of septic shock, see e.g., U.S. Pat. No. 7,262,178, and references cited therein.

### Neuropathic Pain

[0437] Neuropathic pain is a complex, chronic pain state that usually is accompanied by tissue injury. With neuropathic pain, the nerve fibers themselves might be damaged, dysfunctional, or injured. These damaged nerve fibers send incorrect signals to other pain centers. The impact of a nerve fiber injury includes a change in nerve function both at the site of injury and areas around the injury.

[0438] Neuropathic pain often seems to have no obvious cause. It responds poorly to standard pain treatment and occasionally might get worse instead of better over time. For some people, it can lead to serious disability. One example of neuropathic pain is called phantom limb syndrome. This occurs when an arm or a leg has been removed because of illness or injury, but the brain still gets pain messages from the nerves that originally carried impulses from the missing limb. These nerves now seem to misfire and cause pain. Some common causes of neuropathic pain include: alcoholism, amputation, back, leg, and hip problems, cancer chemotherapy, diabetes, facial nerve problems, HIV infection or AIDS, multiple sclerosis, shingles, and spine surgery.

[0439] Some symptoms of neuropathic pain include shooting pain, burning pain, tingling, and numbness.

[0440] Improvement is often possible with proper treatment. Treatments include: administering an NSAID, an analgesic (e.g., with morphine), an anticonvulsant drug (e.g., an anticonvulsant described in U.S. Pat. No. 5,760,007), an antidepressant drug, or other pain reliever. If another condition, such as diabetes, is involved, better management of that disorder might alleviate the neuropathic pain. In cases that are difficult to treat, a pain specialist might use invasive or implantable device therapies to effectively manage the pain. Electrical stimulation of the nerves involved in neuropathic pain generation might significantly control the pain symptoms.

[0441] MMP-9 and MMP-2 have been found to play roles in the development of neuropathic pain. MMP-9 is upregaulated in the early phase of neuropathic pain development, while MMP-2 is upregulated in the late phase of neuropathic pain development. Targeting and inhibition of MMP-9 and/or MMP-2 is a therapeutic approach to treating neuropathic pain. The disclosure provides methods of treating neuropathic pain by administering a therapeutically effective amount of an MMP-9/MMP-2 binding protein or MMP-9 binding protein (e.g., an inhibitory MMP-9/MMP-2 binding protein or inhibitory MMP-9 binding protein, e.g., an anti-MMP-9/MMP-2 IgG or Fab, or anti-MMP-9 IgG or Fab) to a subject having or suspected of having neuropathic pain. Also provided are methods of treating neuropathic pain by administering a therapeutically effective amount of an MMP-9/MMP-2 binding protein or MMP-9 binding protein with another neuropathic pain treatment (e.g., an NSAID, an analgesic (e.g., with morphine), an anticonvulsant drug, an antidepressant drug, or other pain reliever; invasive or implantable device therapies).

[0442] Guidance regarding the efficacy and dosage an MMP-9/MMP-2 binding protein or MMP-9 binding protein which will deliver a therapeutically effective amount of the protein can be obtained from an animal model of neuropathic pain, such as the L5 spinal nerve ligation (SNL) animal model, see e.g., Kawasaki et al., Feb. 10, 2008, Nat. Med. advance on-line publication doi:10.1038/nm1723. See also U.S. Pat. No. 5,760,007 and references cited therein.

### Endometriosis

[0443] Endometriosis is a common medical condition characterized by growth beyond or outside the uterus of endometrium, the tissue that normally lines the uterus. In endometriosis, the endometrium is found to be growing outside the uterus, on or in other areas of the body. Normally, the endometrium is shed each month during the menstrual cycle; however, in endometriosis, the misplaced endometrium is usually unable to exit the body. The endometriotic tissues still detach and bleed, but the result is far different: internal bleeding, degenerated blood and tissue shedding, inflammation of the surrounding areas, pain, and formation of scar tissue may result. In addition, depending on the location of the growths, interference with the normal function of the bowel, bladder, small intestines and other organs within the pelvic cavity can occur. In very rare cases, endometriosis has also been found in the skin, the lungs, the eye, the diaphragm, and the brain.

[0444] A major symptom of endometriosis is severe recurring pain. The amount of pain a woman feels is not necessarily related to the extent or stage (1 through 4) of endometriosis. Some women will have little or no pain despite having extensive endometriosis affecting large areas or having endometriosis with scarring. On the other hand, women may have severe pain even though they have only a few small areas of endometriosis.

[0445] Symptoms of endometriosis can include (but are not limited to): Painful, sometimes disabling menstrual cramps (dysmenorrhea), pain may get worse over time (progressive pain), chronic pain (typically lower back pain and pelvic pain, also abdominal), painful sex (dyspareunia), painful bowel movements (dyschezia) or painful urination (dysuria), heavy menstrual periods (menorrhagia), nausea and vomiting, premenstrual or intermenstrual spotting (bleeding between periods), and infertility and subfertility. Endometriosis may lead to fallopian tube obstruction. Bowel obstruction (possibly including vomiting, crampy pain, diarrhea, a rigid and tender abdomen, and distention of the abdomen, depending on where the blockage is and what is causing it) or complete urinary retention. In addition, women who are diagnosed with endometriosis may have gastrointestinal symptoms that may mimic irritable bowel syndrome, as well as fatigue.

[0446] Patients who rupture an endometriotic cyst may present with an acute abdomen as a medical emergency. Endometriotic cysts in the thoracic cavity may cause some form of thoracic endometriosis syndrome, most often catamenial pneumothorax.

[0447] Diagnosis. Health history and a physical examination can in many patients lead the physician to suspect the diagnosis. Use of imaging tests (e.g., ultrasound and magnetic resonance imaging (MRI)) may identify larger endometriotic areas, such as nodules or endometriotic cysts. The only sure way to confirm an endometriosis diagnosis is by laparoscopy. The diagnosis is based on the characteristic appearance of the disease, if necessary corroborated by a biopsy. Laparoscopy also allows for surgical treatment of endometriosis.

[0448] Treatment. Generally, endometriosis-directed drug therapy (other than the oral contraceptive pill) is utilized after a confirmed surgical diagnosis of endometriosis. Treatments include: NSAIDs and other pain medication, commonly used in conjunction with other therapy; Gonadotropin Releasing Hormone (GnRH) Agonist; Hormone suppression therapy; Progesterone or Progestins; avoiding products with xenoestrogens, which have a similar effect to naturally produced estrogen and can increase growth of the endometrium; continuous hormonal contraception; suppressive steroids such as Danazol (Danocrine) and gestrinone; aromatase inhibitors. Surgical treatment is usually a good choice if endometriosis is extensive, or very painful. Surgical treatments range from minor to major surgical procedures. Laparoscopy is very useful not only to diagnose endometriosis, but to treat it-endometriotic tissue can be ablated or removed in an attempt to restore normal anatomy. Laparotomy can be used for more extensive surgery either in attempt to restore normal anatomy. Other procedures include hysterectomy, bilateral salpingo-oophorectomy (removal of the fallopian tubes and ovaries), bowel resection. For patients with extreme pain, a presacral neurectomy may be indicated where the nerves to the uterus are cut.

[0449] MMP-9 is upregulated in endometriosis and may contribute to survival and invasion of endometriosis. The disclosure provides methods of treating endometriosis by administering a therapeutically effective amount of an MMP-9/MMP-2 binding protein or MMP-9 binding protein (e.g., an inhibitory MMP-9/MMP-2 binding protein or inhibitory MMP-9 binding protein, e.g., an anti-MMP-9/MMP-2 IgG or Fab, or anti-MMP-9 IgG or Fab) to a subject having or suspected of having endometriosis. Also provided are methods of treating endometriosis by administering a therapeutically effective amount of an MMP-9/MMP-2 binding protein or MMP-9 binding protein with another endometriosis treatment (e.g., corticosteroid, sophorolipid mixture, or antibiotics).

[0450] Guidance regarding the efficacy and dosage an MMP-9/MMP-2 binding protein or MMP-9 binding protein which will deliver a therapeutically effective amount of the protein can be obtained from an animal model of endometriosis, see e.g., U.S. Pat. Nos. 6,429,353 and 7,220,890, and references cited therein.

### Combination Therapies

[0451] The MMP-9/MMP-2 binding proteins or MMP-9 binding protein described herein, e.g., anti-MMP-9/MMP-2 Fabs or IgGs or anti-MMP-9 Fabs or IgGs, can be administered in combination with one or more of the other therapies for treating a disease or condition associated with MMP-9 activity and/or MMP-2 activity, e.g., a disease or condition described herein. For example, an MMP-9/MMP-2 binding protein or MMP-9 binding protein can be used therapeutically or prophylactically with surgery, another MMP-9/MMP-2 inhibitor or MMP-9 inhibitor (e.g., a small molecule inhibitor, another anti-MMP-9/MMP-2 or anti-MMP-9 Fab or IgG (e.g., another Fab or IgG described herein), peptide inhibitor, or small molecule inhibitor), another anti-MMP-9/MMP-2 binding protein or anti-MMP-9 binding protein (e.g., IgG or Fab, e.g., 539A-M0166-F10 or a protein containing one or more heavy and/or light chains CDRs thereof, or 539A-M0240-B03 or a protein containing one or more heavy and/or light chains CDRs thereof, or another Fab or IgG described herein), an anti-MMP14 binding protein (e.g., IgG or Fab, e.g., DX-2400, or a protein described in U.S. Pub. App. No. 2007-0217997), or another MMP-2 inhibitor (another MMP-2 inhibitor, e.g., a small molecule inhibitor, another anti-MMP-2 Fab or IgG (e.g., another Fab or IgG described herein), peptide inhibitor, or small molecule inhibitor). Examples of other MMP-9 inhibitors and MMP-2 inhibitors that can be used in combination therapy with an MMP-9/MMP-2 binding protein described herein are provided herein.

[0452] One or more small-molecule MMP inhibitors can be used in combination with one or more MMP-9/MMP-2 binding proteins or MMP-9 binding proteins described herein. For example, the combination can result in a lower dose of the small-molecule inhibitor being needed, such that side effects are reduced.

[0453] The MMP-9/MMP-2 binding proteins or MMP-9 binding proteins described herein can be administered in combination with one or more of the other therapies for treating cancers, including, but not limited to: surgery; radiation therapy, and chemotherapy. For example, proteins that inhibit MMP-9, MMP-2 or that inhibit a downstream event of MMP-9 activity or MMP-2 activity can also be used in combination with other anti-cancer therapies, such as radiation therapy, chemotherapy, surgery, or administration of a second agent. For example, the second agent can be a Tie-1 inhibitor (e.g., Tie-1 binding proteins; see e.g., U.S. Ser. No. 11/199,739 and PCT/US2005/0284, both filed Aug. 9, 2005). As another example, the second agent can be an anti-MMP14 binding protein (e.g., IgG or Fab, e.g., DX-2400, or a protein described in U.S. Pub. App. No. 2007-0217997). As another example, the second agent can be one that targets or negatively regulates the VEGF signaling pathway. Examples of this latter class include VEGF antagonists (e.g., anti-VEGF antibodies such as bevacizumab) and VEGF receptor antagonists (e.g., anti-VEGF receptor antibodies). One particularly preferred combination includes bevacizumab. As a further example, the second agent is an inhibitor of plasmin, such as a kunitz domain-containing protein or polypeptide (e.g., a plasmin-inhibiting kunitz domain disclosed in U.S. Pat. No. 6,010,880, such as a protein or polypeptide comprising the amino acid sequence MHSFCAFKAETGPCRARFDRWFFNIFTRQCEEFIYGGCEGNQNRFESLEECKKMCTRD (SEQ ID NO:1)). As another example, the second agent is an agent that binds to Her2, such as a Her2-binding antibody (e.g., trastuzumab). The combination can further include 5-FU and leucovorin, and/or irinotecan.

[0454] Inhibitors of MMP-9 and/or MMP-2 (e.g., the MMP-9/MMP-2 binding proteins or MMP-9 binding proteins disclosed herein) can potentiate the activity of an agent that targets Her2 (e.g., a Her2-binding antibody such as trastuzumab). Accordingly, in one combination therapy for the treatment of breast cancer, the second therapy is an agent that binds Her2, such as a Her2-binding antibody (e.g., trastuzumab). When an MMP-9/MMP-2 binding protein or MMP-9 binding protein is used in a combination therapy with a Her2 binding agent, the dose of the Her2 binding agent may be reduced from the dose of the Her2 binding agent when administered not in combination with an MMP-9/MMP-2 binding protein or MMP-9 binding protein (e.g., is at least 10%, 25%, 40%, or 50% less than the dose of the Her2 binding agent when administered not in combination with an MMP-9/MMP-2 binding protein or MMP-9 binding protein). For example, the dose of trastuzumab, when administered in a combination therapy with an MMP-9/MMP-2 binding protein or MMP-9 binding protein is less than about 4.0, 3.6, 3.0, 2.4, or 2 mg/kg as an initial (loading) dose, and less than about 2.0, 1.8, 1.5, 1.2, or 1 mg/kg in subsequent doses.

[0455] The MMP-9/MMP-2 binding proteins or MMP-9 binding proteins described herein can also be administered in combination with one or more other therapies for treating ocular disorders, such as surgical or medical (e.g., administration of a second agent) therapies. For example, in treatment of age-related macular degeneration (e.g., wet age-related macular degeneration), an MMP-9/MMP-2 binding protein or MMP-9 binding protein may be administered in conjunction with (e.g., before, during, or after) laser surgery (laser photocoagulation or photocoagulation therapy). As another example, the MMP-9/MMP-2 binding protein or MMP-9 binding protein can be administered in combination with a second agent, such as a VEGF antagonist (e.g., an anti-VEGF antibody such as bevacizumab or ranibizumab) or a VEGF receptor antagonist (e.g., anti-VEGF receptor antibodies).

[0456] The term “combination” refers to the use of the two or more agents or therapies to treat the same patient, wherein the use or action of the agents or therapies overlap in time. The agents or therapies can be administered at the same time (e.g., as a single formulation that is administered to a patient or as two separate formulations administered concurrently) or sequentially in any order. Sequential administrations are administrations that are given at different times. The time between administration of the one agent and another agent can be minutes, hours, days, or weeks. The use of an MMP-9/MMP-2 binding protein or MMP-9 binding protein described herein can also be used to reduce the dosage of another therapy, e.g., to reduce the side-effects associated with another agent that is being administered, e.g., to reduce the side-effects of an anti-VEGF antibody such as bevacizumab. Accordingly, a combination can include administering a second agent at a dosage at least 10, 20, 30, or 50% lower than would be used in the absence of the MMP-9/MMP-2 binding protein or MMP-9 binding protein.

[0457] In addition, a subject can be treated for an angiogenesis-associated disorder, e.g., a cancer, by administering to the subject a first and second agent. For example, the first agent modulates early stage angiogenesis and the second agent modulates a subsequent stage of angiogenesis or also modulates early stage angiogenesis. The first and second agents can be administered using a single pharmaceutical composition or can be administered separately. In one embodiment, the first agent is a VEGF pathway antagonist (e.g., an inhibitor of a VEGF (e.g., VEGF-A, -B, or -C) or a VEGF receptor (e.g., KDR or VEGF receptor III (Flt4)) or a bFGF pathway antagonist (e.g., an antibody that binds to bFGF or a bFGF receptor). Other VEGF pathway antagonists are also described, herein and elsewhere. In one embodiment, the second agent inhibits or decreases the mobility or invasiveness of tumor cells. For example, the second agent comprises an MMP-9/MMP-2 binding protein or MMP-9 binding protein. For example, the second agent is an MMP-9/MMP-2 binding protein or MMP-9 binding protein described herein.

[0458] Once a tumor reaches a certain size (e.g., ˜1-2 mm), the tumor requires new vasculature prior to increasing its mass. An early stage of tumor angiogenesis can include a signal from the tumor, e.g., secretion of VEGF, to stimulate the growth of new blood vessels from the host and infiltration of the tumor by the vessels. VEGF can, for example, stimulate proliferation of endothelial cells that are then assembled into blood vessels. A late stage of tumor growth can include metastasis, mobility and invasiveness of tumor cells. This mobility and invasiveness may involve the action of matrix metalloproteinases, e.g., MMP-2 or MMP-9. Thus, an effective therapy to treat angiogenesis-related disorders can involve a combination of an agent that modulates an early stage angiogenesis (e.g., VEGF pathway antagonists, e.g., anti-VEGF (e.g., bevacizumab) or anti-VEGF receptor (e.g., anti-KDR) antibodies; or antagonists of other pro-angiogenic pathways, e.g., anti-bFGF antibodies or anti-bFGF receptor (e.g., anti-bFGF receptor-1, -2, -3) antibodies) and an agent that modulates a late stage of tumor growth can include metastasis, mobility and invasiveness of tumor cells s (e.g., antagonists of MMP-9 and MMP2 (e.g., anti-MMP-9/MMP-2 antibodies or MMP-9 binding protein (e.g., an antibody disclosed herein)). One or more of these agents can be used in combination. One or more of these agents may also be used in combination with other anti-cancer therapies, such as radiation therapy or chemotherapy.

[0459] Exemplary VEGF receptor antagonists include inhibitors of a VEGF (e.g., VEGF-A, -B, or -C, for example bevacizumab), modulators of VEGF expression (e.g., INGN-241, oral tetrathiomolybdate, 2-methoxyestradiol, 2-methoxyestradiol nanocrystal dispersion, bevasiranib sodium, PTC-299, Veglin), inhibitors of a VEGF receptor (e.g., KDR or VEGF receptor III (Flt4), for example anti-KDR antibodies, VEGFR2 antibodies such as CDP-791, IMC-1121B, VEGFR2 blockers such as CT-322), VEGFR3 antibodies such as mF4-31C1 from Imclone Systems, modulators of VEGFR expression (e.g., VEGFR1 expression modulator Sirna-027) or inhibitors of VEGF receptor downstream signaling.

[0460] Exemplary inhibitors of VEGF include bevacizumab, pegaptanib, ranibizumab, NEOVASTAT®, AE-941, VEGF Trap, and PI-88.

[0461] Exemplary VEGF receptor antagonists include inhibitors of VEGF receptor tyrosine kinase activity. 4-[4-(1-Amino-1-methylethyl)phenyl]-2-[4-(2-morpholin-4-yl-ethyl)phenylamino]pyrimidine-5-carbonitrile (JNJ-17029259) is one of a structural class of 5-cyanopyrimidines that are orally available, selective, nanomolar inhibitors of the vascular endothelial growth factor receptor-2 (VEGF-R2). Additional examples include: PTK-787/ZK222584(Astra-Zeneca), SU5416, SU11248 (Pfizer), and ZD6474 ([N-(4-bromo-2-fluorophenyl)-6-methoxy-7-[(1-methylpiperidin-4-yl)methoxy]quinazolin-4-amine]), vandetanib, cediranib, AG-013958, CP-547632, E-7080, XL-184, L-21649, and ZK-304709. Other VEGF antagonist agents are broad specificity tyrosine kinase inhibitors, e.g., SU6668 (see, e.g., Bergers, B. et al., 2003 J. Clin. Invest. 111:1287-95), sorafenib, sunitinib, pazopanib, vatalanib, AEE-788, AMG-706, axitinib, BIBF-1120, SU-14813, XL-647, XL-999, ABT-869, BAY-57-9352, BAY-73-4506, BMS-582664, CEP-7055, CHIR-265, OSI-930, and TKI-258. Also useful are agents that down regulate VEGF receptors on the cell surface, such as fenretinide, and agents which inhibit VEGF receptor downstream signaling, such as squalamine

[0462] The second agent or therapy can also be another anti-cancer agent or therapy. Non-limiting examples of anti-cancer agents include, e.g., anti-microtubule agents, topoisomerase inhibitors, antimetabolites, mitotic inhibitors, alkylating agents, intercalating agents, agents capable of interfering with a signal transduction pathway, agents that promote apoptosis, radiation, and antibodies against other tumor-associated antigens (including naked antibodies, immunotoxins and radioconjugates). Examples of the particular classes of anti-cancer agents are provided in detail as follows: antitubulin/antimicrotubule, e.g., paclitaxel, vincristine, vinblastine, vindesine, vinorelbin, taxotere; topoisomerase I inhibitors, e.g., irinotecan, topotecan, camptothecin, doxorubicin, etoposide, mitoxantrone, daunorubicin, idarubicin, teniposide, amsacrine, epirubicin, merbarone, piroxantrone hydrochloride; antimetabolites, e.g., 5 fluorouracil (5 FU), methotrexate, 6 mercaptopurine, 6 thioguanine, fludarabine phosphate, cytarabine/Ara C, trimetrexate, gemcitabine, acivicin, alanosine, pyrazofurin, N-Phosphoracetyl-L-Asparate=PALA, pentostatin, 5 azacitidine, 5 Aza 2′ deoxycytidine, ara A, cladribine, 5 fluorouridine, FUDR, tiazofurin, N-[5-[N-(3,4-dihydro-2-methyl-4-oxoquinazolin-6-ylmethyl)-N-methylamino]-2-thenoyl]-L-glutamic acid; alkylating agents, e.g., cisplatin, carboplatin, mitomycin C, BCNU=Carmustine, melphalan, thiotepa, busulfan, chlorambucil, plicamycin, dacarbazine, ifosfamide phosphate, cyclophosphamide, nitrogen mustard, uracil mustard, pipobroman, 4 ipomeanol; agents acting via other mechanisms of action, e.g., dihydrolenperone, spiromustine, and desipeptide; biological response modifiers, e.g., to enhance anti-tumor responses, such as interferon; apoptotic agents, such as actinomycin D; and anti-hormones, for example anti-estrogens such as tamoxifen or, for example antiandrogens such as 4′-cyano-3-(4-fluorophenylsulphonyl)-2-hydroxy-2-methyl-3′-(trifluoromethyl) propionanilide.

[0463] A combination therapy can include administering an agent that reduces the side effects of other therapies. The agent can be an agent that reduces the side effects of anti-cancer treatments. For example, the agent can be leucovorin.

[0464] Combination therapies that include administering an MMP-9/MMP-2 binding protein or MMP-9 binding protein, or other binding protein described herein can also be used to treat a subject having or at risk for another angiogenesis related disorder (e.g., a disorder other than cancer, e.g., disorders that include undesired endothelial cell proliferation or undesirable inflammation, e.g., rheumatoid arthritis).

### Diagnostic Uses

[0465] Proteins that bind to MMP-9 and/or MMP-2 and identified by the method described herein and/or detailed herein have in vitro and in vivo diagnostic utilities. The MMP-9/MMP-2 binding proteins or MMP-9 binding proteins described herein (e.g., the proteins that bind and inhibit, or the proteins that bind but do not inhibit MMP-9 and MMP-2) can be used, e.g., for in vivo imaging, e.g., during a course of treatment for a disease or condition in which MMP-9 and/or MMP-2 is active, e.g., a disease or condition described herein, or in diagnosing a disease or condition described herein.

[0466] In one aspect, the disclosure provides a diagnostic method for detecting the presence of an MMP-9, an MMP-2 or both, in vitro or in vivo (e.g., in vivo imaging in a subject). The method can include localizing MMP-9, MMP-2 or both within a subject or within a sample from a subject. With respect to sample evaluation, the method can include, for example: (i) contacting a sample with MMP-9/MMP-2 binding protein or MMP-9 binding protein; and (ii) detecting location of the MMP-9/MMP-2 binding protein or MMP-9 binding protein in the sample.

[0467] An MMP-9/MMP-2 binding protein or MMP-9 binding protein can also be used to determine the qualitative or quantitative level of expression of MMP-9 and/or MMP-2 in a sample. The method can also include contacting a reference sample (e.g., a control sample) with the binding protein, and determining a corresponding assessment of the reference sample. A change, e.g., a statistically significant change, in the formation of the complex in the sample or subject relative to the control sample or subject can be indicative of the presence of MMP-9 and/or MMP-2 in the sample.

[0468] The MMP-9/MMP-2 binding proteins or MMP-9 binding proteins are also useful for in vivo tumor imaging. Better clinical endpoints are needed to monitor the efficacy of drugs, such as MMP-inhibitors, that are designed to block enzymatic function (Zucker et al, 2001, Nature Medicine 7:655-656). Imaging of tumors in vivo by using labeled MMP-9/MMP-2 binding proteins or MMP-9 binding proteins could be of help to target the delivery of the binding protein to tumors for cancer diagnosis, intraoperative tumor detection, and for investigations of drug delivery and tumor physiology. MMP-9/MMP-2 binding proteins or MMP-9 binding protein can be used to monitor native enzymatic activity in vivo at invasive sites. Another exemplary method includes: (i) administering the MMP-9/MMP-2 binding protein or MMP-9 binding protein to a subject; and (iii) detecting location of the MMP-9/MMP-2 binding protein or MMP-9 binding protein in the subject. The detecting can include determining location or time of formation of the complex.

[0469] The MMP-9/MMP-2 binding protein or MMP-9 binding protein can be directly or indirectly labeled with a detectable substance to facilitate detection of the bound or unbound antibody. Suitable detectable substances include various enzymes, prosthetic groups, fluorescent materials, luminescent materials and radioactive materials.

[0470] Complex formation between the MMP-9/MMP-2 binding protein and MMP-9 and/or MMP-2, or between the MMP-9 binding protein and MMP-9 can be detected by evaluating the binding protein bound to the MMP-9 and/or MMP-2 or unbound binding protein. Conventional detection assays can be used, e.g., an enzyme-linked immunosorbent assays (ELISA), a radioimmunoassay (RIA) or tissue immunohistochemistry. Further to labeling the MMP-9/MMP-2 binding protein or MMP-9 binding protein, the presence of MMP-9 and/or MMP-2 can be assayed in a sample by a competition immunoassay utilizing standards labeled with a detectable substance and an unlabeled MMP-9/MMP-2 binding protein or MMP-9 binding protein. In one example of this assay, the biological sample, the labeled standards, and the MMP-9/MMP-2 binding protein or MMP-9 binding protein are combined and the amount of labeled standard bound to the unlabeled binding protein is determined. The amount of MMP-9 and/or MMP-2 in the sample is inversely proportional to the amount of labeled standard bound to the MMP-9/MMP-2 binding protein or MMP-9 binding protein.

[0471] Fluorophore and chromophore labeled proteins can be prepared. Because antibodies and other proteins absorb light having wavelengths up to about 310 nm, the fluorescent moieties should be selected to have substantial absorption at wavelengths above 310 nm and preferably above 400 nm. A variety of suitable fluorescers and chromophores are described by Stryer, 1968, Science 162:526 and Brand, L. et al., 1972, Annu. Rev. Biochem. 41:843 868. The proteins can be labeled with fluorescent chromophore groups by conventional procedures such as those disclosed in U.S. Pat. Nos. 3,940,475, 4,289,747, and 4,376,110. One group of fluorescers having a number of the desirable properties described above is the xanthene dyes, which include the fluoresceins and rhodamines. Another group of fluorescent compounds are the naphthylamines. Once labeled with a fluorophore or chromophore, the protein can be used to detect the presence or localization of the MMP-9 and/or MMP-2 in a sample, e.g., using fluorescent microscopy (such as confocal or deconvolution microscopy).

[0472] Histological Analysis. Immunohistochemistry can be performed using the proteins described herein. For example, in the case of an antibody, the antibody can be synthesized with a label (such as a purification or epitope tag), or can be detectably labeled, e.g., by conjugating a label or label-binding group. For example, a chelator can be attached to the antibody. The antibody is then contacted to a histological preparation, e.g., a fixed section of tissue that is on a microscope slide. After an incubation for binding, the preparation is washed to remove unbound antibody. The preparation is then analyzed, e.g., using microscopy, to identify if the antibody bound to the preparation.

[0473] Of course, the antibody (or other polypeptide or peptide) can be unlabeled at the time of binding. After binding and washing, the antibody is labeled in order to render it detectable.

[0474] Protein Arrays. The MMP-9 binding protein can also be immobilized on a protein array. The protein array can be used as a diagnostic tool, e.g., to screen medical samples (such as isolated cells, blood, sera, biopsies, and the like). Of course, the protein array can also include other binding proteins, e.g., that bind to MMP-9, MMP-2 or to other target molecules.

[0475] Methods of producing polypeptide arrays are described, e.g., in De Wildt et al., 2000, Nat. Biotechnol. 18:989-994; Lueking et al., 1999, Anal. Biochem. 270:103-111; Ge, 2000, Nucleic Acids Res. 28, e3, I-VII; MacBeath and Schreiber, 2000, Science 289:1760-1763; WO 01/40803 and WO 99/51773A1. Polypeptides for the array can be spotted at high speed, e.g., using commercially available robotic apparati, e.g., from Genetic MicroSystems or BioRobotics. The array substrate can be, for example, nitrocellulose, plastic, glass, e.g., surface-modified glass. The array can also include a porous matrix, e.g., acrylamide, agarose, or another polymer.

[0476] For example, the array can be an array of antibodies, e.g., as described in De Wildt, supra. Cells that produce the proteins can be grown on a filter in an arrayed format. Polypeptide production is induced, and the expressed polypeptides are immobilized to the filter at the location of the cell. A protein array can be contacted with a labeled target to determine the extent of binding of the target to each immobilized polypeptide. Information about the extent of binding at each address of the array can be stored as a profile, e.g., in a computer database. The protein array can be produced in replicates and used to compare binding profiles, e.g., of a target and a non-target.

[0477] FACS (Fluorescence Activated Cell Sorting). The MMP-9/MMP-2 binding protein or MMP-9 binding protein can be used to label cells, e.g., cells in a sample (e.g., a patient sample). The binding protein is also attached (or attachable) to a fluorescent compound. The cells can then be sorted using fluorescence activated cell sorter (e.g., using a sorter available from Becton Dickinson Immunocytometry Systems, San Jose Calif.; see also U.S. Pat. Nos. 5,627,037; 5,030,002; and 5,137,809). As cells pass through the sorter, a laser beam excites the fluorescent compound while a detector counts cells that pass through and determines whether a fluorescent compound is attached to the cell by detecting fluorescence. The amount of label bound to each cell can be quantified and analyzed to characterize the sample.

[0478] The sorter can also deflect the cell and separate cells bound by the binding protein from those cells not bound by the binding protein. The separated cells can be cultured and/or characterized.

[0479] In Vivo Imaging. Also featured is a method for detecting the presence of an MMP-9 expressing and/or MMP-2 expressing tissue in vivo. The method includes (i) administering to a subject (e.g., a patient having, e.g., a cancer (e.g., metastatic cancer, e.g., metastatic breast cancer), an inflammatory disease (e.g., chronic obstructive pulmonary disease (COPD), asthma, rhinitis (e.g., allergic rhinitis), inflammatory bowel disease, synovitis, rheumatoid arthritis), heart failure, septic shock, neuropathic pain, osteoarthritis, or an ocular condition (e.g., macular degeneration)) an anti-MMP-9/MMP-2 antibody or anti-MMP-9 antibody, conjugated to a detectable marker; (ii) exposing the subject to a means for detecting said detectable marker to the MMP-9/MMP-2 expressing tissues or cells. For example, the subject is imaged, e.g., by NMR or other tomographic means.

[0480] Examples of labels useful for diagnostic imaging include radiolabels such as ¹³¹I, ¹¹¹In, ¹²³I, ^{99m}Tc, ³²P, ¹²⁵I, ³H, ¹⁴C, and ¹⁸⁸Rh, fluorescent labels such as fluorescein and rhodamine, nuclear magnetic resonance active labels, positron emitting isotopes detectable by a positron emission tomography (“PET”) scanner, chemiluminescers such as luciferin, and enzymatic markers such as peroxidase or phosphatase. Short range radiation emitters, such as isotopes detectable by short range detector probes can also be employed. The protein can be labeled with such reagents; for example, see Wensel and Meares, 1983, Radioimmunoimaging and Radioimmunotherapy, Elsevier, New York for techniques relating to the radiolabeling of antibodies and D. Colcher et al., 1986, Meth. Enzymol. 121: 802 816.

[0481] The binding protein can be labeled with a radioactive isotope (such as ¹⁴C, ³H, ³⁵S, ¹²⁵I, ³²P, ¹³¹I). A radiolabeled binding protein can be used for diagnostic tests, e.g., an in vitro assay. The specific activity of a isotopically-labeled binding protein depends upon the half life, the isotopic purity of the radioactive label, and how the label is incorporated into the antibody.

[0482] In the case of a radiolabeled binding protein, the binding protein is administered to the patient, is localized to cells bearing the antigen with which the binding protein reacts, and is detected or “imaged” in vivo using known techniques such as radionuclear scanning using e.g., a gamma camera or emission tomography. See e.g., A. R. Bradwell et al., “Developments in Antibody Imaging”, Monoclonal Antibodies for Cancer Detection and Therapy, R. W. Baldwin et al., (eds.), pp 65 85 (Academic Press 1985). Alternatively, a positron emission transaxial tomography scanner, such as designated Pet VI located at Brookhaven National Laboratory, can be used where the radiolabel emits positrons (e.g., ¹¹C, ¹⁸F, ¹⁵O, and ¹³N).

[0483] MRI Contrast Agents. Magnetic Resonance Imaging (MRI) uses NMR to visualize internal features of living subject, and is useful for prognosis, diagnosis, treatment, and surgery. MRI can be used without radioactive tracer compounds for obvious benefit. Some MRI techniques are summarized in EP-A-0 502 814. Generally, the differences related to relaxation time constants T1 and T2 of water protons in different environments is used to generate an image. However, these differences can be insufficient to provide sharp high resolution images.

[0484] The differences in these relaxation time constants can be enhanced by contrast agents. Examples of such contrast agents include a number of magnetic agents paramagnetic agents (which primarily alter T1) and ferromagnetic or superparamagnetic (which primarily alter T2 response). Chelates (e.g., EDTA, DTPA and NTA chelates) can be used to attach (and reduce toxicity) of some paramagnetic substances (e.g., Fe⁺³, Mn⁺², Gd⁺³). Other agents can be in the form of particles, e.g., less than 10 mm to about 10 nM in diameter). Particles can have ferromagnetic, antiferromagnetic, or superparamagnetic properties. Particles can include, e.g., magnetite (Fe₃O₄), γ-Fe₂O₃, ferrites, and other magnetic mineral compounds of transition elements. Magnetic particles may include: one or more magnetic crystals with and without nonmagnetic material. The nonmagnetic material can include synthetic or natural polymers (such as sepharose, dextran, dextrin, starch and the like.

[0485] The MMP-9/MMP-2 binding protein or MMP-9 binding protein can also be labeled with an indicating group containing of the NMR active ¹⁹F atom, or a plurality of such atoms inasmuch as (i) substantially all of naturally abundant fluorine atoms are the ¹⁹F isotope and, thus, substantially all fluorine containing compounds are NMR active; (ii) many chemically active polyfluorinated compounds such as trifluoracetic anhydride are commercially available at relatively low cost; and (iii) many fluorinated compounds have been found medically acceptable for use in humans such as the perfluorinated polyethers utilized to carry oxygen as hemoglobin replacements. After permitting such time for incubation, a whole body MRI is carried out using an apparatus such as one of those described by Pykett, 1982, Sci. Am. 246:78 88 to locate and image tissues expressing MMP-9 and MMP-2.

[0486] The contents of all references, pending patent applications and published patents, cited throughout this application are hereby expressly incorporated by reference. The following examples provide further illustrate and are not limiting.

### EXAMPLES

[0487] Throughout this disclosure, in reference to binding proteins, the format of a capital letter followed by a zero and three digits-dash-letter and two digits (e.g., M0237-D02) refers to the same protein as the format of a capital letter followed by three digits-dash-letter and two digits (e.g., M237-D02). For example, the antibody M0237-D02 is also referred to as M237-D02. Further, a prefix may or may not be present; the presence of the prefix does not change which protein is being referred to. For example, the antibody 539A-M0237-D02 is also referred to as M0237-D02 or M237-D02.

### Example 1

### Selection and Screening of Anti-MMP-9 Fabs and IgGs

[0488] Two strategies were employed to identify anti-MMP-9 antibodies:

[0489] (1) Capture of a non-biotinylated form of MMP-9 (PMA-activated) by a biotinylated binding but not inhibiting Fab (e.g. M0076-D03 or M0078-G07, Table 80) with the subsequent immobilization of the biotinylated entity on a streptavidin coated surface; and

[0490] (2) Biotinylated MMP-9 (PMA activated) in solution. Phage, suitably depleted (e.g., previous contact with streptavidin) were allowed to interact with the target, unbound phage washed away and the output sampled and/or amplified for the next round of selection. This was repeated until the output phage in ELISA analysis indicate a high percentage of binders. 128/2076 unique sFabs were identified by ELISA and sequencing.

[0491] Antibodies M0076-D03 and M0078-G07 (Table 80) were found using biotinylated MMP-9. Neither antibody inhibits the catalytic activity of MP-9. It was determined that Fab M0078-G07 has an apparent K_{D}=3.1 nM, does not compete with TIMP-1, and has a dissociation t_{1/2} of 25 minutes while M0076-D03 has apparent K_{D}=5.9 nM, does not compete with TIMP-1, and has t_{1/2}=33 minutes. All of the inhibitory antibodies were selected using non-biotinylated MMP-9 immobilized with biotinylated M0076-D03.

[0492] After sequencing analysis, the phage display were converted into sFabs and then into IgG1s. Their ability to inhibit MMP-9 and other MMPs (1, 3, 7, 8, 9, 10, 12, 13, 14) was determined by usual means. Compounds were initially screened at 1 μM against MMP-9 and those compounds that inhibited MMP-9 >80% were subjected to additional screens against purified recombinant human MMP-2 (APMA activated enzyme) and other MMPs. For these additional screens, an IC₅₀ value was determined. Ki values and specificities of the inhibitors were determined as described below.

### Example 2

### Ki Determination for Human and Mouse MMP-9

[0493] This example characterized the interaction of the M0237-D02 hIgG1 with the human and mouse MMP-9. The Ki was measured and the inhibition mechanism was determined

[0494] Materials:
[0495] Substrate: Mca-KPLGL-Dap(Dnp)-AR-NH₂ (M-2350) from BACHEM (521575). A 10 mM stock solution was prepared in DMSO.
[0496] Enzymes:
   [0497] Human MMP-9 catalytic domain (BIOMOL, SE-244). Enzyme concentration was measured by titration with TIMP-1 (2522-104)
   [0498] Mouse MMP-9 (R&D, 909-MM), APMA-activated.
[0499] M0237-D02 hIgG1: 2517-014. Dialysed against TCN.
[0500] TCNB: 50 mM Tris/HCl, 10 mM CaCl₂, 150 mM NaC, 10.05% Brij 35, pH 7.5.
[0501] -96-well black plates from Perkin Elmer (6005270)
[0502] Spectramax M2e to measure fluorescence emission of the substrate upon hydrolysis (temperature control set at 30° C.; λ_{exc}=328 nm and λₑₘ=393 nm)

[0503] Kᵢ Measurements and Inhibition Model Characterization

[0504] The enzyme (final concentration=0.23 and 0.17 nM for the human and mouse MMP-9, respectively) was preincubated with various concentrations (0-50 nM) of M0237-D02 for 1 h at 30° C. The substrate was then added to a final concentration ranging from 5 to 40 μM and initial rates were recorded.

[0505] Each data point was measured in triplicate, and initial rates were averaged.

[0506] Averaged initial rates were plotted against the M0237-D02 concentration for each substrate concentration, and IC₅₀'s were calculated using the following equation:

$$y = \frac{Range}{1 + {( \frac{x}{{IC}_{50}} )}^{s}}$$

[0507] FIGS. 1A and 1B are two line graphs showing IC₅₀ (nM) versus substrate concentration (μM) of an MMP-9 binding protein (539A-M0237-D02). In FIG. 1A, the substrate is human MMP-9. In FIG. 1B, the substrate is mouse MMP-9.

[0508] The IC₅₀ values were then plotted against the substrate concentration.

[0509] Ki Determination and Inhibition Model Characterization

[0510] As shown in FIGS. 1A and 2B, a Ki of 0.92±0.04 nM for the human MMP-9 and 1.3±0.1 nM for the mouse MMP-9 were calculated.

### Example 3

### Interaction of M0166-F10 & M0237-D02 with a h-TIMP-1/h-MMP-9 Complex

[0511] Experimental data obtained with fluorogenic peptide substrates suggest that M0237-D02 behaves as a non competitive inhibitor of the human and mouse MMP-9. The non competitive inhibition model implies that the ternary complex enzyme-substrate-inhibitor can form. It is however possible that this complex cannot form with bigger substrates, in which case the antibody would behave as a competitive inhibitor. In order to address this issue, the ability of M0237-D02 antibody to bind to the h-MMP-9 when the enzyme is complexed to its natural inhibitor h-TIMP-1 was determined. The reasoning is that if the antibody cannot bind to the h-MMP-9/h-TIMP-1 complex, it would probably behave as a competitive inhibitor of this enzyme in the presence of bigger substrates. Alternatively, if the ternary complex enzyme-TIMP-1-antibody can form, it is likely that the antibody will behave as a non competitive inhibitor even in the presence of large substrates.

[0512] Experiments were performed at 25° C. with the help of a Biacore 3000 instrument. The MMP-9 binding protein (M0166F10) and the M0237-D02 antibody were coated to a CM5 chip either via standard amine coupling or using an anti-Fc antibody surface. Then either the active, human MMP-9 catalytic domain (BIOMOL, SE-244), the human pro-MMP-9 (R&D, 911-MP), the human TIMP-1 (R&D, 970-TM) or a h-MMP-9/h-TIMP-1 complex were flowed over the antibody surfaces, and binding was recorded. The data are summarized in the table below.

TABLE 3

| | 539A-M0166F10 | | 539A-M0237D02 | |
|---|---|---|---|---|
| | Direct | Fc | Direct | Fc |
| | capture | capture | capture | capture |
| Cat-huMMP-9 | Yes | Yes | No | Yes |
| | (slow | (slow binding) | | (slow binding) |
| | binding) | | | |
| Pro-huMMP-9 | ~No | ND | No | ND |
| huTIMP-1 | No | ND | No | ND |
| huTIMP-1/ | No | ND | No | No |
| cat-huMMP-9 | | | | |

ND—not determined

[0513] It was shown that the human MMP-9 catalytic domain binds to M0166-F10, whether this antibody is directly captured via amine coupling or captured with an anti-Fc antibody surface. By contrast, no binding was observed to M0166-F10 when the enzyme was complexed to the h-TIMP-1. Binding of the human MMP-9 catalytic domain to M0237-D02 could be observed only if this antibody was captured via an anti-Fc antibody, which suggests that amine coupling results in the inactivation of M0237-D02. Similarly to M0166-F10, no binding was observed with the MMP-9/TIMP-1 complex. Interestingly, binding to the pro-MMP-9 was observed neither for M237-D02 nor for M0166-F10.

[0514] This indicates that M0237-D02 cannot bind to the TIMP-1/MMP-9 complex, which suggests that it would behave as a competitive inhibitor in the presence of bigger substrates. Similar findings for the M0166-F10 antibody suggest that the latter is also a competitive inhibitor, at least with large substrates.

### Example 4

### Inhibition of Human MMP-9 by M0237-D02: Progress Curves and Kinetic Analysis

[0515] The kinetics of the interaction between M0237-D02 and the human MMP-9 were determined. The rates were determined using the following equation:

$$E + I {⇔}_{{k}_{off}}^{{k}_{on}} EI and {K}_{I} = \frac{{k}_{off}}{{k}_{on}} = \frac{[ E ] \cdot [ I ]}{[ EI ]}$$

[0516] The second order rate constant for the association of the enzyme E and the inhibitor I (kₒₙ) and the first order rate constant for the dissociation of the complex EI (k_{off}) can be calculated from inhibition progress curves obtained at different inhibitor concentrations.

[0517] Materials:
[0518] Substrate: Mca-KPLGL-Dap(Dnp)-AR-NH₂ (M-2350) from BACHEM (521575). A 10 mM stock solution was prepared in DMSO.
[0519] Human MMP-9 catalytic domain (BIOMOL, SE-244).
[0520] M0237-D02 hIgG1: 2517-068.
[0521] All measurements were performed at 25° C. in TCNB: 50 mM Tris/HCl, 10 mM CaCl₂, 150 mM NaC10.05% Brij 35, pH 7.5.
[0522] 96-well black plates from Perkin Elmer (6005270)
[0523] Spectramax M2e to measure fluorescence emission of the substrate upon hydrolysis (λ_{exc}=328 nm and λₑₘ=393 nm)

[0524] Procedure:

[0525] The enzyme (at a final concentration ranging from 1.5 to 12.3 nM), the substrate (9 μM final) and the M0237-D02 antibody were mixed, and the fluorescence was immediately recorded in order to follow the hydrolysis of the substrate. The observed inhibition rate (k_{obs}) was obtained by analyzing the progress curves with a single exponential. The value for kₒₙ and k_{off} were calculated from the plot of the k_{obs} vs. the antibody concentration using the following equation:

k_{obs}=kₒₙ[l]+k_{off}

[0526] k_{obs} was measured at four antibody concentrations (table below):

TABLE 4

| M0237-D02 | |
|---|---|
| concentration (nM) | k_{obs} (s⁻¹) |
| 14.4 | 0.0013 |
| 19.2 | 0.0019 |
| 28.8 | 0.0024 |
| 115.2 | 0.0086 |

[0527] The plot of k_{obs} vs. the antibody concentration (below) gave kₒₙ ˜7 10⁴ M⁻¹ s⁻¹ and k_{off} ˜4 10⁻⁴ s⁻¹.

### Example 5

### Film In Situ Zymography

[0528] PBS-control treated tumors were screened with M0237-D02 for gelatinase expression using the FIZ approach. The tumors tested were Colo205 and MCF-7. Briefly, frozen slides of tumpor sections were dried at room temperature and 200 μl of in situ Zymo buffer (TCNB)+20 μg/ml of gelatin quenched substrate from molecular probes was added. The slides were incubate at 37° C. overnight in the presence of M0237-D02 at 500 nM or GM6001 used as a positive control at 100 μM. The substrate was washed in MilliQ (3 times) and the mounted slides were treated with anti-Fade+Dapi mounting medium.

[0529] In the Colo205 and MCF-7 tumor sections, a complete inhibition of gelatinolytic activity was observed in the presence of the dual MMP-2/-9 inhibitor M0237-D02 (500 nM) and M0237-D02 binds and inhibits tumoral MMP-2-9.

### Example 6

### Evaluation of 539A-M0237-D02 in Inflammation

[0530] The purpose of the following experiments were to determine the effect of 539A-M0237-D02 on inflammation and specifically on inflammatory cell infiltration into the carrageenan-stimulated mouse air pouch and on the arthritic index in collagen-induced arthritis (CIA) mice.

[0531] For the carrageenan-stimulated mouse air pouch model, subcutaneous injection of air into the hind flank or back of mice produces an air pouch in a week, the interior surface of which contains both fibroblast-like and macrophage-like cells. Inflammatory stimulation of the pouch results in leukocyte recruitment to the pouch and release of mediators (cytokines) into the exudate. Preventing inflammatory cell infiltration into the air pouch may translate into preventing inflammation of the synovium in rheumatoid arthritis.

[0532] The effect of 539A-M0237-D02 on inflammatory cell infiltration was compared to inflammatory cell infiltration indomethacin and a control (PBS). In addition, inflammatory cell recruitment was compared to an unstimulated mouse. As shown in FIG. 2, 539A-M0237-D02 significantly decreased total white blood cell infiltration and specifically neutrophil and lymphocyte infiltration.

[0533] The collagen-induced arthritis (CIA) was produced by the immunization of susceptible strains of mice with native type II collagen. The collagen was emulsified in Freund's complete adjuvant and injected subcutaneously. A booster injection of collagen in incomplete adjuvant was given IP 21 days after the initial immunization. The disease is due to an auto-immune response induced upon immunization with collagen.

[0534] The effect 539A-M0237-D02 on the arthritic index was compared to administration of methotrexate (MTX). As shown in FIG. 3, the arthritic index was decreased in the CIA model as compared to untreated mice.

### Example 7

[0535] The DNA and amino acid sequences of variable regions of 539A-M0237-D02 sFAB are as follows:

539A-M0237-D02 (phage/SFAB) VL leader + VL
SEQ ID NO: 2
TTCTATTCTCACAGTGCACAAGACATCCAGATGACCCAGTCTCCAGCCA
CCCTGTCTTTGTCTCCAGGGGAAAGAGCCACCCTCTCCTGCAGGGCCAG
TCAGAGTATTAGCAGCTTCTTAGCCTGGTACCAACAGAAACCTGGCCAG
GCTCCCAGGCTCCTCATCTATGATGCATCGTATAGGGCCACTGGCATCC
CAGCCAGGTTCAGTGGCAGTGGGTCTGGGACAGACTTCACTCTCACCAT
CAGCAGCCTGGAGCCTGAAGATTATGCAGTTTATTACTGTCAGCAGCGT
GGCAACTGGCCTATCACCTTCGGCCAAGGGACGCGGCTGGAGATTAAAC
GAACTGTGGCTGCACCATCT
SEQ ID NO: 3
FYSHSAQDIQMTQSPATLSLSPGERATLSCRASQSISSFLAWYQQKPGQ
APRLLIYDASYRATGIPARFSGSGSGTDFTLTISSLEPEDYAVYYCQQR
GNWPITFGQGTRLEIKRTVAAPS
539A-M0237-D02 (phage/SFAB) VH leader + VH
SEQ ID NO: 4
ATGAAGAAGCTCCTCTTTGCTATCCCGCTCGTCGTTCCTTTTGTGGCCC
AGCCGGCCATGGCCGAAGTTCAATTGTTAGAGTCTGGTGGCGGTCTTGT
TCAGCCTGGTGGTTCTTTACGTCTTTCTTGCGCTGCTTCCGGATTCACT
TTCTCTCAGTACCCTATGTGGTGGGTTCGCCAAGCTCCTGGTAAAGGTT
TGGAGTGGGTTTCTTATATCGTTCCTTCTGGTGGCCGTACTTATTATGC
TGACTCCGTTAAAGGTCGCTTCACTATCTCTAGAGACAACTCTAAGAAT
ACTCTCTACTTGCAGATGAACAGCTTAAGGGCTGAGGACACGGCCGTGT
ATTACTGTGCGAAAGATCGGGCCTACGGTGATTACGTGGGCTGGAACGG
TTTTGACTACTGGGGCCAGGGCACCCTGGTCACCGTCTCAAGCGCCTCC
ACCAAGGGCCCATCGGTCTTCCCGCTAGCACCCTCCTCCAAGAGC
SEQ ID NO: 5:
MKKLLFAIPLVVPFVAQPAMAEVQLLESGGGLVQPGGSLRLSCAASGFT
FSQYPMWWVRQAPGKGLEWVSYIVPSGGRTYYADSVKGRFTISRDNSKN
TLYLQMNSLRAEDTAVYYCAKDRAYGDYVGWNGFDYWGQGTLVTVSSAS
TKGPSVFPLAPSSKS

### Example 8

### Studies with Colon Cancer Cells

[0536] The efficacies of novel antibodies DL8, DL12, DL15 and DL2 in the Colo205 colon carcinoma model were evaluated. The antibodies were tested alone or in combination. The results are shown in FIG. 4.

[0537] Drugs and Treatment:

| | | 1 Drug/Testing Agent | | | | | 2 Drug/Testing Agent | | | | |
|---|---|---|---|---|---|---|---|---|---|---|---|
| Gr. | N | Agent | Vehicle | mg/kg | Route | Schedule | Agent | Vehicle | mg/kg | Route | Schedule |
| 1^{#} | 10 | vehicle | PBS | — | ip | qod to end | — | — | — | — | — |
| 2 | 10 | paclitaxel | 5% EC | 30 | iv | qod x 5 | — | — | — | — | — |
| 3 | 10 | DL8 | PBS | 20 | ip | qod to end | — | — | — | — | — |
| 4 | 10 | DL12 | PBS | 20 | ip | qod to end | — | — | — | — | — |
| 5 | 10 | DL15 | PBS | 20 | ip | qod to end | — | — | — | — | — |
| 6 | 10 | DL2 | Citrate buffer | 10 | ip | qod to end | — | — | — | — | — |
| 7 | 10 | DL2 | Citrate buffer | 10 | ip | qod to end | DL12 | PBS | 20 | ip | qod to end |

^{#}Control Group

[0538] Procedures:
[0539] Set up HRLN female nu/nu mice with 1×10⁶ Colo205 tumor cells in 50% Matrigel subcutaneously (sc) in flank
[0540] Do a pair match when tumors reach an average size of 100-150 mg, and begin treatment
[0541] Body Weight: daily for the first five days and then biwk to end
[0542] Caliper Measurement: biwk to end
[0543] Final body weights and calipers should be taken on the last day of the study.
[0544] Endpoint TGI (tumor growth inhibition). Animals are to be monitored as a group. The endpoint of the experiment is a mean tumor weight in Control Group of 1 gms or 45 days, whichever comes first. When the endpoint is reached, all the animals are to be euthanized.

[0545] Study Conditions:

[0546] Statistical analysis of the data will be performed using:
[0547] Kruskal-Wallis with post hoc Dunn's test Groups 3-7 vs Group 1 and Group 7 vs Groups 4 and 6
[0548] Mann-Whitney test Group 1 vs Group 2

[0549] Clinical agent PACLITAXEL is for use as a positive control only

[0550] Dosing:
[0551] Prepare dosing solutions:
   [0552] DL2, DL8, DL12, DL15—every week, store at 4° C.
   [0553] paclitaxel—every dose, store at room temp
[0554] DL12=B03 in PBS=539A-M0240-B03 IgG1 (h/mMMP-9 antibody inhibitor) (parental)
[0555] DL8=D02 in PBS=539A-M0237-D02 IgG1 (MMP-9/-2 dual reactive antibody inhibitor) (parental)
[0556] DL15=F10 in PBS=539A-M0166-F10 IgG1 (hMMP-9 antibody inhibitor) (parental)
[0557] DL2=DX-2400 in citrate buffer solution.
[0558] paclitaxel=paclitaxel in 5% Ethanol:5% Cremophor EL:90% D5W
[0559] vehicle=PBS
[0560] Dosing volume=10 mL/kg (0.200 mL/20 g mouse). Adjust volume accordingly for body weight.
[0561] Save remaining compound for future use
[0562] Discard remaining dosing solution

[0563] Sampling:

[0564] Sampling 1
[0565] Timepoint: 24 hours post 5^{th} dose of DL10 (Day 10)
[0566] All Groups, the 6 Animals closest to mean:
[0567] Blood Collection
   [0568] Collect full volume blood by terminal cardiac puncture under CO₂ anesthesia
   [0569] Process blood for:
      [0570] Serum (anti-coagulant—none, preservation—freeze, shipping condition—−80° C.)

[0571] Sampling 2
[0572] Timepoint: 24 hours post 10^{th} dose of DL10 (Day 20)
[0573] All Groups, same animals sampled in Sampling 1:
[0574] Blood Collection as above

[0575] Sampling 3
[0576] Timepoint: at endpoint (24 hrs post last DL dose)
[0577] All Groups All Animals:
[0578] Blood Collection
   [0579] Collect full volume blood by terminal cardiac puncture under CO₂ anesthesia
   [0580] Process blood for:
      [0581] Serum (anti-coagulant—none, preservation—freeze, shipping condition—−80° C.)
[0582] Organ Collection
   [0583] Tumor (weigh sample, divide into 2 parts)
      [0584] Part 1: preservation—snapfreeze in a cryovial, shipping condition—−80° C.
      [0585] Part 2: preservation—OCT, shipping condition—−80° C.

[0586] 539A-M0240-B03: 539A-M0240-B03 is an inhibitory MMP-9 binding antibody. The variable domain sequences for 539A-M0240-B03 are:

[chemical structure]

[0587] 539A-M0166-F10: 539A-M0166-F10 is an inhibitory MMP-9 binding antibody. The variable domain sequences for 539A-M0166-F10 are:

539A-M0166-F10 (phage/SFAB) VL leader + VL
SEQ ID NO: 2:
TTCTATTCTCACAGTGCACAGAGCGAATTGACTCAGCCACCGTCAGCGTCTGCGGCCCCCGGGCAGAGGGTCACCAT
CTCTTGTTCTGGAAGCAGCTCCAACATCGGAAGTAACACTGTAACCTGGTACCAGAAGCTCCCAGGAACGGCCCCCA
AGCTCCTCATTTACAATAATTATGAGCGGCCCTCAGGGGTCCCTGCCCGATTCTCTGGCTCCAAGTCTGGCACCTCA
GCCTCCCTGGCCATCAGTGGGCTCCAGTCTGAGGATGAGGCTGATTATTACTGTGCAACATGGGATGACAGCCTGAT
TGCCAATTACGTCTTCGGAAGTGGGACCAAGGTCACCGTCCTAGGTCAGCCCAAGGCCAACCCC
SEQ ID NO: 3:
FYSHSAQSELTQPPSASAAPGQRVTISCSGSSSNIGSNTVTWYQKLPGTAPKLLIYNNYERPSGVPARFSGSKSGTS
ASLAISGLQSEDEADYYCATWDDSLIANYVFGSGTKVTVLGQPKANP
539A-M0166-F10 (phage/SFAB) VH leader + VH
SEQ ID NO: 4:
ATGAAGAAGCTCCTCTTTGCTATCCCGCTCGTCGTTCCTTTTGTGGCCCAGCCGGCCATGGCCGAAGTTCAATTGTT
AGAGTCTGGTGGCGGTCTTGTTCAGCCTGGTGGTTCTTTACGTCTTTCTTGCGCTGCTTCCGGATTCACTTTCTCTC
CTTACCTTATGAATTGGGTTCGCCAAGCTCCTGGTAAAGGTTTGGAGTGGGTTTCTTCTATCTATTCTTCTGGTGGC
GGTACTGGTTATGCTGACTCCGTTAAAGGTCGCTTCACTATCTCTAGAGACAACTCTAAGAATACTCTCTACTTGCA
GATGAACAGCTTAAGGGCTGAGGACACGGCCGTGTATTACTGTGCGAGAATATACCATAGCAGCAGTGGACCTTTCT
ACGGTATGGACGTCTGGGGCCAAGGGACCACGGTCACCGTCTCAAGCGCCTCCACCAAGGGCCCATCGGTCTTCCCG
CTAGCACCCTCCTCCAAGAGC
SEQ ID NO: 5:
MKKLLFAIPLVVPFVAQPAMAEVQLLESGGGLVQPGGSLRLSCAASGFTFSPYLMNWVRQAPGKGLEWVSSIYSSGG
GTGYADSVKGRFTISRDNSKNTLYLQMNSLRAEDTAVYYCARIYHSSSGPFYGMDVWGQGTTVTVSSASTKGPSVFP
LAPSSKS

[0588] DX-2400: DX-2400 is an inhibitory MMP-14 binding antibody. The variable domain sequences for DX-2400 are:

### VH:

| | |
|---|---|
| | FR1--------------------------- CDR1- FR2----------- CDR2------- |
| DX-2400 | EVQLLESGGGLVQPGGSLRLSCAASGFTFS LYSMN WVRQAPGKGLEWVS SIYSSGGSTLY |
| | CDR2-- FR3----------------------------- CDR3-- FR4--------- |
| DX-2400 | ADSVKG RFTISRDNSKNTLYLQMNSLRAEDTAVYYCAR GRAFDI WGQGTMVTVSS |

CDR regions are in bold.

### VL:

| | |
|---|---|
| | FR1-------------------- CDR1------- FR2------------ CDR2--- |
| DX-2400 | DIQMTQSPSSLSASVGDRVTITC RASQSVGTYLN WYQQKPGKAPKLLIY ATSNLRS GVPS |
| | FR3------------------------- CDR3------ FR4------- |
| DX-2400 | RFSGSGSGTDFTLTISSLQPEDFATYYC QQSYSIPRFT FGPGTKVDIK |

CDR regions are in bold.

[0591] 539A-M0237-D02: The variable domain sequences for 539A-M0237-D02 are provided above.

### Example 9

### Studies with Pancreatic Cancer Cells

[0592] The efficacies of novel antibodies DL8, DL12, and DL2 in the BxPC-3 pancreatic carcinoma model were evaluated. The antibodies were tested alone or in combination. The results are shown in FIG. 5.

[0593] Drugs and Treatment:

| | | 1 Drug/Testing Agent | | | | | 2 Drug/Testing Agent | | | | |
|---|---|---|---|---|---|---|---|---|---|---|---|
| Gr. | N | Agent | Vehicle | mg/kg | Route | Schedule | Agent | Vehicle | mg/kg | Route | Schedule |
| 1^{#} | 10 | vehicle | PBS | — | Ip | qod to end | — | — | — | — | — |
| 2 | 10 | paclitaxel | 5% EC | 30 | Iv | qod x 5 | — | — | — | — | — |
| 3 | 10 | DL8 | PBS | 20 | Ip | qod to end | — | — | — | — | — |
| 4 | 10 | DL12 | PBS | 20 | Ip | qod to end | — | — | — | — | — |
| 5 | 10 | DL2 | Citrate buffer | 10 | Ip | qod to end | — | — | — | — | — |
| 6 | 10 | DL2 | Citrate buffer | 10 | Ip | qod to end | DL12 | PBS | 20 | ip | qod to end |

^{#}Control Group

[0594] Procedures:
[0595] Set up HRLN female nu/nu mice with 1 mm³ Bx-PC3 tumor fragments sc in flank
[0596] Do a pair match when tumors reach an average size of 80-120 mg, and begin treatment
[0597] Body Weight: 5/2 then biwk to end
[0598] Caliper Measurement: biwk to end
[0599] Final body weights and calipers should be taken on the last day of the study.
[0600] Endpoint TGI. Animals are to be monitored as a group. The endpoint of the experiment is a mean tumor weight in Control Group of 1 gms or 45 days, whichever comes first. When the endpoint is reached, all the animals are to be euthanized.

[0601] Study Conditions:

[0602] Statistical analysis of the data will be performed using:
[0603] Kruskal-Wallis with post hoc Dunn's test Groups 3-6 vs Group 1 and Group 6 vs Group 3 and Group 5
[0604] Mann-Whitney test Group 1 vs Group 2

[0605] Clinical agent PACLITAXEL is for use as a positive control only

[0606] Dosing:
[0607] Prepare dosing solutions:
   [0608] DL2, DL8, DL12—every week, store at 4° C.
   [0609] paclitaxel—every dose, store at room temp
[0610] DL12=B03 in PBS
[0611] DL8=D02 in PBS
[0612] DL2=DX-2400 in citrate buffer solution
[0613] paclitaxel=paclitaxel in 5% Ethanol:5% Cremophor EL:90% D5W
[0614] vehicle=PBS
[0615] Dosing volume=10 mL/kg (0.200 mL/20 g mouse). Adjust volume accordingly for body weight.
[0616] Save remaining compound for future use
[0617] Discard remaining dosing solution

[0618] Sampling:

[0619] Sampling 1
[0620] Timepoint: 24 hours post 5^{th} dose (Day 10)
[0621] All Groups 6 Animals closest to mean:
[0622] Blood Collection
   [0623] Collect full volume blood by terminal cardiac puncture under CO₂ anesthesia
   [0624] Process blood for:
      [0625] Serum (anti-coagulant—none, preservation—freeze, shipping condition—−80° C.)

[0626] Sampling 2
[0627] Timepoint: 24 hours post 10^{th} dose (Day 20)
[0628] All Groups same animals sampled in Sampling 1:
[0629] Blood Collection as above

[0630] Sampling 3
[0631] Timepoint: at endpoint (24 hours post last dose)
[0632] All Groups All Animals:
[0633] Blood Collection
   [0634] Collect full volume blood by terminal cardiac puncture under CO₂ anesthesia
   [0635] Process blood for:
      [0636] Serum (anti-coagulant—none, preservation—freeze, shipping condition—−80° C.)
[0637] Organ Collection
   [0638] Tumor (weigh sample, divide into 2 parts)
      [0639] Part 1: preservation—snap freeze in a cryovial, shipping condition—−80° C.
      [0640] Part 2: preservation—OCT, shipping condition—−80° C.

### Example 10

### Affinity Matured Variants of 539A-M0237-D02

[0641] Enzyme Inhibition Screening Strategy

[0642] 343 unique sFabs from the anti-MMP-9/-2 M237-D02 affinity maturation campaign were discovered by phage display, produced in small scale (6 mL cultures in deep 24-well plates) and screened to select inhibitors with sub-nanomolar potency against the human enzymes and at least single-digit nanomolar potency toward the mouse orthologues. Since the parental clone displayed weaker potency for h/m MMP-2 as compared to h/m MMP-9, isolates were initially tested in a single point inhibition screen for significant improvement in the inhibition of hMMP-2 (>˜90%) and mMMP-2 (>˜50%). Isolates which appeared potent against both human and mouse MMP-2 were then subjected to IC₅₀ analysis against hMMP-9. Sub-nanomolar inhibitors of hMMP-9 were further tested by IC₅₀ analysis against mMMP-9 and h/m MMP-2, if sufficient small-scale sFab material was available. Thirteen potential h/m MMP-9/-2 sFab inhibitors were then produced in medium scale (250 mL cultures in flasks) and retested for h/m MMP-9 and h/m MMP-2 inhibition. Five potential lead candidates were reformatted as IgGs and retested in enzyme inhibition assays.

[0643] In addition, a parallel effort to discover MMP-9 specific isolates is described in Example 17. sFabs that did not show inhibition of h/m MMP-2 in the single point inhibition screen were tested by IC₅₀ analysis against human MMP-9. Four potential MMP-9 specific sFabs were produced in medium-scale and retested. At least some of these MMP-9 specific isolates were selected for reformatting to IgG.

[0644] M237-D02 (also referred to herein as 539A-M0237-D02) was used as the parent antibody for affinity maturation. Two libraries were built and Fabs that bind all of the targets (hMMP9, hMMP2, mMMP9, and mMMP2) were selected. One library allows the selected LC of M237-D02 to be replaced with any LC of the FAB-310 library (Hoet et al., Nat. Biotechnol. 2005 23:344-348). The other library allowed HC CDR1-2 to be replaced by any HC CDR1-2 of the FAB-310 library. Table 5 gives the LV and HV CDR sequences of the affinity matured variants of M237-D02. Following Table 5 is a listing of the full sequence of LV and HV for these antibodies. Sequences for VL, VH and part of the constant region for M0237-D02, M0275-D03, M0273-G07, M0273-C10, M0273-A11, M0276-F11, M0275-E12, M0274-G08, M0272-H08, M0273-B10, M0301-D12, M0307-F04, M0299-A12, M0301-A09, M256-D11, M299-C08, M281-F06, and M306-D04 are listed afterwards.

[0645] Table 6 shows the selected FABs from the HC-CDR1-2 library at positions 25-66. Non-standard position 58a was allowed so that sequences having an insert could be displayed. In Table 6, “-” means that the sequence is identical to M237-D02; “#” means there is a deletion.

[0646] Table 7 shows the VLs of M0237-D02 and M0275-D02 compared to germline. In Table 7, “-” means that the sequence is identical to germline L6::JK5.

[0647] Antibodies having the sequences described herein can be expressed by joining DNA encoding a signal sequence to DNA encoding the sequences given as is known to persons with skill in the art.

[0648] The VH CDR1 and CDR2 sequences of M0237-D02, M0275-D03, M0273-G07, M0273-C10, M0273-A11, M0276-F11, M0275-E12, M0274-G08, M0272-H08, M0273-B10, M0301-D12, M0307-F04, M0299-A12, M0301-A09, and M256-D11 as shown in Table 6 were analyzed and the following sequence characteristics were observed.

[0649] VH CDR1 contains residues 31-35 and only residues 31, 33, and 35 were allowed to vary. All but one of the isolates have W35, suggesting the importance for binding all four targets. The P33 of the parental M0237-D02 is preferentially replaced with D, evidently preferred for binding all four targets. At position 31, there is no strong preference although four isolates have H. Antibodies that are more likely to have suitable solubility properties could be picked.

[0650] VH CDR2 contains residues 50, 51, 52, 52a, and 53-65. Positions 50, 52, 52a, 56, and 58 were varied. At position 50, the parental Y has mostly changed to V (only VGYRSW were allowed). At position 52, the parental V has mostly changed to Y (only VGYRSW were allowed). At 52a, only P and S were allowed and both seem to be accepted. M0275-D03 lacks an amino acid at position 55. At position 56, all amino acids except C were allowed. The parental R has been rejected but there is no clear preference; there are 4 Ys, 3 Ps, 3 As, 2 Ts, 1 F, and 1 G. At position 58, all amino acids except C were allowed. Two of the isolates retain the parental Y, 5 have F, 2 have G, 2 have S, and one has A.

[0651] There are only two VLs in this collection of isolates (SEQ ID NO:1-30). One is the VL with SEQ ID NO:3, which was originally isolated from M0237-D02. The other is shown in Table 8 as M0275-D03-LC. The departures from germline in the framework regions was changed to give the sequence M0237-D02 (SEQ ID NO: 1) shown in Table 8.

TABLE 5
CDRs of 623 hMMP2/hMMP9/mMMP2/mMMP9-inhibiting Abs

| Initial Name | LV-CDR1 | LV-CDR2 | LV-CDR3 | HV-CDR1 | HV-CDR2 | HV-CDR3 |
|---|---|---|---|---|---|---|
| M237-D02 | RASQSISSFLA | DASYRAT | QQRGNWPIT | QYPMW | YIVPSGGRTYYADSVKG | DRAYGDYVGWNGFDY |
| M265-C07 | RASQNVARFLA | SASNRAT | QQRGNWPIT | QYPMW | YIVPSGGRTYYADSVKG | DRAYGDYVGWNGFDY |
| M265-A07 | RASQNVHTYLA | EASNRAT | QQRGGWPIT | QYPMW | YIVPSGGRTYYADSVKG | DRAYGDYVGWNGFDY |
| M256-D03 | RASQSISSFLA | DASYRAT | QQRGNWPIT | VYPMI | YISPSGGFTGYADSVKG | DRAYGDYVGWNGFDY |
| M256-E10 | RASQSISSFLA | DASYRAT | QQRGNWPIT | DYPMW | VIYPSGGATFYADSVKG | DRAYGDYVGWNGFDY |
| M256-E03 | RASQSISSFLA | DASYRAT | QQRGNWPIT | TYPMI | YISPSGGYTGYADSVKG | DRAYGDYVGWNGFDY |
| M256-D11 | RASQSISSFLA | DASYRAT | QQRGNWPIT | HYDMW | VIYSSGGPTFYADSVKG | DRAYGDYVGWNGFDY |
| M256-A04 | RASQSISSFLA | DASYRAT | QQRGNWPIT | HYPMW | SISPSGGATYYADSVKG | DRAYGDYVGWNGFDY |
| M256-G09 | RASQSISSFLA | DASYRAT | QQRGNWPIT | KYPMW | SIYPSGGATFYADSVKG | DRAYGDYVGWNGFDY |
| M256-A07 | RASQSISSFLA | DASYRAT | QQRGNWPIT | HYDML | YISSSGGYTGYADSVKG | DRAYGDYVGWNGFDY |
| M256-C09 | RASQSISSFLA | DASYRAT | QQRGNWPIT | KYPMW | YISSSGGGTFYADSVKG | DRAYGDYVGWNGFDY |
| M256-C07 | RASQSISSFLA | DASYRAT | QQRGNWPIT | LYDMW | YISSSGGATFYADSVKG | DRAYGDYVGWNGFDY |
| M256-B03 | RASQSISSFLA | DASYRAT | QQRGNWPIT | RYPMW | YISPSGGFTSYADSVKG | DRAYGDYVGWNGFDY |
| M266-E02 | RASQSVGRFLA | GASSRAT | QQRGNWPIT | QYPMW | YIVPSGGRTYYADSVKG | DRAYGDYVGWNGFDY |
| M266-D03 | RASQNIGSDLA | GASSRAT | QQRGNWPIT | QYPMW | YIVPSGGRTYYADSVKG | DRAYGDYVGWNGFDY |
| M263-F05 | RASQSVGNFLA | GASNRAT | QQRGNWPIT | QYPMW | YIVPSGGRTYYADSVKG | DRAYGDYVGWNGFDY |
| M264-A09 | RASQVIFSGLA | AASNLQS | QQAQTFPFT | QYPMW | YIVPSGGRTYYADSVKG | DRAYGDYVGWNGFDY |
| M263-F01 | RASQNIGRWLA | GASSLQT | QQRRKWPVT | QYPMW | YIVPSGGRTYYADSVKG | DRAYGDYVGWNGFDY |
| M265-A04 | RASQNIGSDLA | RASFRAT | QQRGNWPPT | QYPMW | YIVPSGGRTYYADSVKG | DRAYGDYVGWNGFDY |
| M278-C09 | RASQSISSFLA | DASYRAT | QQRGNWPIT | QYPMW | YIVPSGGRTYYADSVKG | DRAYGDYVGWNGFDY |
| M279-H01 | RATQGIGTFLA | GASTLQS | QQRYTWPIT | QYPMW | YIVPSGGRTYYADSVKG | DRAYGDYVGWNGFDY |
| M280-G04 | TASQSVGSHLA | DTSSRAT | QQRRSWPLT | QYPMW | YIVPSGGRTYYADSVKG | DRAYGDYVGWNGFDY |
| M281-C08 | RASQSVSSDLA | GASTRAT | QQRAYWPVS | QYPMW | YIVPSGGRTYYADSVKG | DRAYGDYVGWNGFDY |
| M287-C10 | RASQHIYTSLA | EASYRAT | QQRGSWPIT | QYPMW | YIVPSGGRTYYADSVKG | DRAYGDYVGWNGFDY |
| M281-H08 | RASQSVSSYLA | GASTRAT | QQRGFWPIT | QYPMW | YIVPSGGRTYYADSVKG | DRAYGDYVGWNGFDY |
| M292-E02 | RASQSVSSYLA | GASNRAT | QQRGNWPIT | QYPMW | YIVPSGGRTYYADSVKG | DRAYGDYVGWNGFDY |
| M290-B12 | RASQSVSSVA | DTSNRAT | QQRTKWPIT | QYPMW | YIVPSGGRTYYADSVKG | DRAYGDYVGWNGFDY |
| M279-B07 | RASESVGMYIA | GASNRAT | QQRGNWPIT | QYPMW | YIVPSGGRTYYADSVKG | DRAYGDYVGWNGFDY |
| M296-E03 | GASQSVSSSYLA | DASSRAT | QQYGSSPWT | QYPMW | YIVPSGGRTYYADSVKG | DRAYGDYVGWNGFDY |
| M282-B10 | RASPSISNFLA | GASNRAT | QQRRSWPPT | QYPMW | YIVPSGGRTYYADSVKG | DRAYGDYVGWNGFDY |
| M283-D07 | RASQNIGGYLA | GASNRAT | QQRSNWPPT | QYPMW | YIVPSGGRTYYADSVKG | DRAYGDYVGWNGFDY |
| M289-B05 | RASQNVANYLD | DGSNRAT | QQRHSWPPIT | QYPMW | YIVPSGGRTYYADSVKG | DRAYGDYVGWNGFDY |
| M283-D09 | RASQNVHTYLA | EASNRAT | QQRGGWPIT | QYPMW | YIVPSGGRTYYADSVKG | DRAYGDYVGWNGFDY |
| M284-B05 | RASQSIGNHLA | DASNRAT | QQRGNWPIT | QYPMW | YIVPSGGRTYYADSVKG | DRAYGDYVGWNGFDY |
| M293-E07 | RASQSISSFLA | DASYRAT | QQRGNWPIT | QYPMW | YIVPSGGRTYYADSVKG | DRAYGDYVGWNGFDY |
| M295-G02 | RASQSISSFLA | GASSRAR | QQRGNWPIT | QYPMW | YIVPSGGRTYYADSVKG | DRAYGDYVGWNGFDY |
| M293-D07 | RASQSISSFLA | GASTRAT | QQRGNWPIT | QYPMW | YIVPSGGRTYYADSVKG | DRAYGDYVGWNGFDY |
| M278-B08 | RASQSISSHLA | GASSRAT | QQRGNWPIT | QYPMW | YIVPSGGRTYYADSVKG | DRAYGDYVGWNGFDY |
| M283-D02 | RASQSISTSLA | DASNRA | QQRGAWPLT | QYPMW | YIVPSGGRTYYADSVKG | DRAYGDYVGWNGFDY |
| M281-A02 | RASQSLGRSDLA | GVSNRVT | QQRSNWPPT | QYPMW | YIVPSGGRTYYADSVKG | DRAYGDYVGWNGFDY |
| M280-H04 | RASQSLGRSDLA | GVSNRVT | QQRSTWPIT | QYPMW | YIVPSGGRTYYADSVKG | DRAYGDYVGWNGFDY |
| M285-D05 | RASQSLGSFLA | GASYRAT | QQRGNWPIT | QYPMW | YIVPSGGRTYYADSVKG | DRAYGDYVGWNGFDY |
| M285-C03 | RASQSVDSYLA | DASNRAT | QHRRSWPLT | QYPMW | YIVPSGGRTYYADSVKG | DRAYGDYVGWNGFDY |
| M284-A01 | RASQSVDSYLA | GASNRAT | QQRRKWPVT | QYPMW | YIVPSGGRTYYADSVKG | DRAYGDYVGWNGFDY |
| M279-F11 | RASQSVGGDIA | GASNRAT | QQRSYWPVT | QYPMW | YIVPSGGRTYYADSVKG | DRAYGDYVGWNGFDY |
| M279-B09 | RASQSVGRDLA | GATTRAT | QQRGNWPIT | QYPMW | YIVPSGGRTYYADSVKG | DRAYGDYVGWNGFDY |
| M281-F02 | RASQSVGSDLA | GASTRAT | QQRGNWPIT | QYPMW | YIVPSGGRTYYADSVKG | DRAYGDYVGWNGFDY |
| M297-F05 | RASQSVGSFLA | GASNRAT | QQRGNWPIT | QYPMW | YIVPSGGRTYYADSVKG | DRAYGDYVGWNGFDY |
| M285-C08 | RASQSVGSQLA | DASYRAT | QQRGNWPIT | QYPMW | YIVPSGGRTYYADSVKG | DRAYGDYVGWNGFDY |
| M292-H03 | RASQSVGTHLA | GASTRAT | QQRRSWPIT | QYPMW | YIVPSGGRTYYADSVKG | DRAYGDYVGWNGFDY |
| M288-E08 | RASQSVNHFLA | GASNRAT | QQRGSWPIT | QYPMW | YIVPSGGRTYYADSVKG | DRAYGDYVGWNGFDY |
| M283-H10 | RASQSVNSFLA | DASNRAT | QQRSNWPIT | QYPMW | YIVPSGGRTYYADSVKG | DRAYGDYVGWNGFDY |
| M280-G06 | RASQSVNSYLA | DASNRAT | QQRGYWPPS | QYPMW | YIVPSGGRTYYADSVKG | DRAYGDYVGWNGFDY |
| M293-E02 | RASQSVSNFLA | GASSRAT | QQRGNWPIT | QYPMW | YIVPSGGRTYYADSVKG | DRAYGDYVGWNGFDY |
| M296-D03 | RASQSVSNYLA | GASTRAT | QQRGNWPIT | QYPMW | YIVPSGGRTYYADSVKG | DRAYGDYVGWNGFDY |
| M296-E02 | RASQSVSRYLA | DASSRAT | HQRSSWPIT | QYPMW | YIVPSGGRTYYADSVKG | DRAYGDYVGWNGFDY |
| M281-H07 | RASQSVSRYLA | DASNRAT | QQRINWPLT | QYPMW | YIVPSGGRTYYADSVKG | DRAYGDYVGWNGFDY |
| M283-C02 | RASQSVSSFLA | HASNRAT | QQRGNWPIT | QYPMW | YIVPSGGRTYYADSVKG | DRAYGDYVGWNGFDY |
| M282-E10 | RASQSVSSFLA | DASNRAS | QQRANWPLT | QYPMW | YIVPSGGRTYYADSVKG | DRAYGDYVGWNGFDY |
| M293-E12 | RASQSVSSHLA | GASSRAT | QQRGNWPIT | QYPMW | YIVPSGGRTYYADSVKG | DRAYGDYVGWNGFDY |
| M278-G02 | RASQSVSSYLA | DASNRAT | QQRGNWPIT | QYPMW | YIVPSGGRTYYADSVKG | DRAYGDYVGWNGFDY |
| M284-D11 | RASQSVSSYLA | GASNRAT | QQRGNWPIT | QYPMW | YIVPSGGRTYYADSVKG | DRAYGDYVGWNGFDY |
| M278-B03 | RASQSVSSYLA | GASHRAT | QQRSNWPIT | QYPMW | YIVPSGGRTYYADSVKG | DRAYGDYVGWNGFDY |
| M280-C06 | RASQSVSSYLA | DASNRAT | QQRGNWPIT | QYPMW | YIVPSGGRTYYADSVKG | DRAYGDYVGWNGFDY |
| M283-G06 | RASQSVSSYLA | DASNRAT | QQRSNWPIT | QYPMW | YIVPSGGRTYYADSVKG | DRAYGDYVGWNGFDY |
| M279-D12 | RASQSVSSYLA | DASNRAT | QQRGNWPIT | QYPMW | YIVPSGGRTYYADSVKG | DRAYGDYVGWNGFDY |
| M279-A02 | RASQSVSSYLA | GASNRAT | QQRSNWPIT | QYPMW | YIVPSGGRTYYADSVKG | DRAYGDYVGWNGFDY |
| M287-F03 | RASQSVSSYLA | GASSRAT | QQRSNWPVT | QYPMW | YIVPSGGRTYYADSVKG | DRAYGDYVGWNGFDY |
| M284-F02 | RASQSVSSYLA | GASTRAT | QQRGNWPIT | QYPMW | YIVPSGGRTYYADSVKG | DRAYGDYVGWNGFDY |
| M282-H04 | RASQSVSSYLA | GASNRAT | QQRGNWPPT | QYPMW | YIVPSGGRTYYADSVKG | DRAYGDYVGWNGFDY |
| M278-A08 | RASQSVSSYLA | GASNRAT | EQRRSWPLT | QYPMW | YIVPSGGRTYYADSVKG | DRAYGDYVGWNGFDY |
| M293-C05 | RASRSVGTHLA | DASVRAA | QQRGGWPIT | QYPMW | YIVPSGGRTYYADSVKG | DRAYGDYVGWNGFDY |
| M280-E08 | RASRSVGTHLA | DASVRAA | QQRGNWPIT | QYPMW | YIVPSGGRTYYADSVKG | DRAYGDYVGWNGFDY |
| M287-B07 | RTSQSVSRYLA | GTSNRAT | QQRYNWPIT | QYPMW | YIVPSGGRTYYADSVKG | DRAYGDYVGWNGFDY |
| M280-H10 | RTSQSVSRYLA | GTSNRAT | QQRYNWPIT | QYPMW | YIVPSGGRTYYADSVKG | DRAYGDYVGWNGFDY |
| M286-E07 | RASQSLSRSDLA | GASNRAT | QQRSNWPPT | QYPMW | YIVPSGGRTYYADSVKG | DRAYGDYVGWNGFDY |
| M280-E12 | RASQSVSSYLA | GASNRAT | QQRSNWPIT | QYPMW | YIVPSGGRTYYADSVKG | DRAYGDYVGWNGFDY |
| M281-A05 | RASQSVGRFLA | GASSRAT | QQRGNWPIT | QYPMW | YIVPSGGRTYYADSVKG | DRAYGDYVGWNGFDY |
| M283-C11 | RASQPVGSYLA | GASNRAT | QQRGNWPLT | QYPMW | YIVPSGGRTYYADSVKG | DRAYGDYVGWNGFDY |
| M279-F07 | RASQSVGYYLA | GASRRAT | QQRSNWPIT | QYPMW | YIVPSGGRTYYADSVKG | DRAYGDYVGWNGFDY |
| M284-H03 | RTSQRVDSNLA | GASTRAT | QQRRKWPVT | QYPMW | YIVPSGGRTYYADSVKG | DRAYGDYVGWNGFDY |
| M295-G08 | RASQSVGSDLA | GASSRAT | QQRGNWPIT | QYPMW | YIVPSGGRTYYADSVKG | DRAYGDYVGWNGFDY |
| M287-E01 | RASQNIGSNLA | GASTRAP | QQRRKWPVT | QYPMW | YIVPSGGRTYYADSVKG | DRAYGDYVGWNGFDY |
| M286-B09 | RASQNIITNLA | GASTRAT | QQRSNWPIT | QYPMW | YIVPSGGRTYYADSVKG | DRAYGDYVGWNGFDY |
| M294-A12 | RASHSVGSDLA | GASTRTA | QQRGNWPPT | QYPMW | YIVPSGGRTYYADSVKG | DRAYGDYVGWNGFDY |
| M287-C12 | RASQGVGSDLA | GASSRAT | QQRRSWPPT | QYPMW | YIVPSGGRTYYADSVKG | DRAYGDYVGWNGFDY |
| M290-C09 | RASQNVNRDLA | GASTRAT | QQRGNWPIT | QYPMW | YIVPSGGRTYYADSVKG | DRAYGDYVGWNGFDY |
| M294-C10 | RASQSINSDLA | HTSYRAP | QQRSDWPVT | QYPMW | YIVPSGGRTYYADSVKG | DRAYGDYVGWNGFDY |
| M278-D06 | RASQSISSDLA | GASSRAT | QQRSYWPVT | QYPMW | YIVPSGGRTYYADSVKG | DRAYGDYVGWNGFDY |
| M290-E01 | RASQSISSFLA | DASYRAT | QQRGNWPIT | QYPMW | YIVPSGGRTYYADSVKG | DRAYGDYVGWNGFDY |
| M293-E09 | RASQSVGADLA | HASTRAT | QQRGNWPPT | QYPMW | YIVPSGGRTYYADSVKG | DRAYGDYVGWNGFDY |
| M288-G11 | RASQSVGSDLA | GASHRAT | QQRYNWPIT | QYPMW | YIVPSGGRTYYADSVKG | DRAYGDYVGWNGFDY |
| M284-B09 | RASQSVGSDLA | GASTRAT | QQRGNWPPT | QYPMW | YIVPSGGRTYYADSVKG | DRAYGDYVGWNGFDY |
| M297-A11 | RASQSVGSNLA | GASIRAT | QQRGNWPIT | QYPMW | YIVPSGGRTYYADSVKG | DRAYGDYVGWNGFDY |
| M294-F06 | RASQSVGSNLA | GASTRAT | QQRAYWPVS | QYPMW | YIVPSGGRTYYADSVKG | DRAYGDYVGWNGFDY |
| M295-E02 | RASQSVGSNLA | GASTRAT | QQRGNWPIT | QYPMW | YIVPSGGRTYYADSVKG | DRAYGDYVGWNGFDY |
| M289-H10 | RASQSVGSNLA | GASTRAT | QQRRNWPVT | QYPMW | YIVPSGGRTYYADSVKG | DRAYGDYVGWNGFDY |
| M283-E03 | RASQSVGSQLA | DASTRAT | QQRGNWPIT | QYPMW | YIVPSGGRTYYADSVKG | DRAYGDYVGWNGFDY |
| M279-E12 | RASQSVNSDLA | GASTRAT | QQRGNWPIT | QYPMW | YIVPSGGRTYYADSVKG | DRAYGDYVGWNGFDY |
| M290-A11 | RASQSVNTDLA | GASTRAT | QQRRNWPVT | QYPMW | YIVPSGGRTYYADSVKG | DRAYGDYVGWNGFDY |
| M284-G09 | RASQSVSSDLA | GASTRAT | QQRRKWPVT | QYPMW | YIVPSGGRTYYADSVKG | DRAYGDYVGWNGFDY |
| M281-C06 | RASQSVSSDLA | AASTRAT | QQRSNWPVT | QYPMW | YIVPSGGRTYYADSVKG | DRAYGDYVGWNGFDY |
| M279-C05 | RASQSVSSDLA | HTSYRAP | QQRSDWPVT | QYPMW | YIVPSGGRTYYADSVKG | DRAYGDYVGWNGFDY |
| M293-F04 | RASQSVSSDLA | RASIRAT | QQRGFWPIT | QYPMW | YIVPSGGRTYYADSVKG | DRAYGDYVGWNGFDY |
| M296-G08 | RASQSVSSDLA | RASIRAT | QQRSAWPVT | QYPMW | YIVPSGGRTYYADSVKG | DRAYGDYVGWNGFDY |
| M281-C10 | RASQSVSSDLA | GASTRAT | QQRSNWPPT | QYPMW | YIVPSGGRTYYADSVKG | DRAYGDYVGWNGFDY |
| M281-H10 | RASQSVSSNLA | GASTRAT | QQCYNWPPT | QYPMW | YIVPSGGRTYYADSVKG | DRAYGDYVGWNGFDY |
| M282-E04 | RASQSVSSNLA | GASTRAT | QQRGNWPIT | QYPMW | YIVPSGGRTYYADSVKG | DRAYGDYVGWNGFDY |
| M286-D09 | RASQSVSSNLA | HASTRAT | QQRGFWPIT | QYPMW | YIVPSGGRTYYADSVKG | DRAYGDYVGWNGFDY |
| M279-F02 | RASQSVSSYLA | GASNTAT | QQRRNWPPT | QYPMW | YIVPSGGRTYYADSVKG | DRAYGDYVGWNGFDY |
| M292-E07 | RASQSVWSNLA | DASYRAT | QQRGNWPIT | QYPMW | YIVPSGGRTYYADSVKG | DRAYGDYVGWNGFDY |
| M284-B10 | RASQTVGTFLA | GASTRAT | QQRSNWPPT | QYPMW | YIVPSGGRTYYADSVKG | DRAYGDYVGWNGFDY |
| M297-B06 | RASESVNSDLA | GASTRAT | QQRGSWPIT | QYPMW | YIVPSGGRTYYADSVKG | DRAYGDYVGWNGFDY |
| M280-B02 | RASQNINSDLA | GASTRAT | QQRGGWPIT | QYPMW | YIVPSGGRTYYADSVKG | DRAYGDYVGWNGFDY |
| M280-C09 | RASQTIFGDLA | GASTRAT | QQRSNWPPT | QYPMW | YIVPSGGRTYYADSVKG | DRAYGDYVGWNGFDY |
| M278-H03 | RASRSVSNNVA | EASNRAT | QQRGGWPIT | QYPMW | YIVPSGGRTYYADSVKG | DRAYGDYVGWNGFDY |
| M284-G06 | RASQSVSNYLA | GASNRAT | QQRRSWPPT | QYPMW | YIVPSGGRTYYADSVKG | DRAYGDYVGWNGFDY |
| M284-G01 | RASQSVGSDLA | GASTRAT | QQRSNWPVT | QYPMW | YIVPSGGRTYYADSVKG | DRAYGDYVGWNGFDY |
| M278-H12 | RASQSVNSHVA | EASDRAA | QQRMYWPPT | QYPMW | YIVPSGGRTYYADSVKG | DRAYGDYVGWNGFDY |
| M282-C08 | RASQSLSRSDLA | GASNRAT | QQRSNWPPT | QYPMW | YIVPSGGRTYYADSVKG | DRAYGDYVGWNGFDY |
| M283-C10 | RASQNIGSNLA | GATTRAT | QQRGNWPIT | QYPMW | YIVPSGGRTYYADSVKG | DRAYGDYVGWNGFDY |
| M279-H07 | RASQGINNNLA | DASNRAT | QQRGNWPIT | QYPMW | YIVPSGGRTYYADSVKG | DRAYGDYVGWNGFDY |
| M280-F10 | RASQSVSSDLA | GASNRAT | QQRSKWPIT | QYPMW | YIVPSGGRTYYADSVKG | DRAYGDYVGWNGFDY |
| M281-F01 | RASQSVGSDLA | GASNRAT | QQRSNWPIT | QYPMW | YIVPSGGRTYYADSVKG | DRAYGDYVGWNGFDY |
| M284-F10 | RASQSVGSFLA | GASNRAP | QQRHNWPIT | QYPMW | YIVPSGGRTYYADSVKG | DRAYGDYVGWNGFDY |
| M286-E06 | RASQSVSNYLA | GVSNRAT | QQRGNWPPT | QYPMW | YIVPSGGRTYYADSVKG | DRAYGDYVGWNGFDY |
| M294-G09 | RASQNLGRSDLA | GVSNRAT | QQRSNWPPT | QYPMW | YIVPSGGRTYYADSVKG | DRAYGDYVGWNGFDY |
| M285-H12 | RASQNVHTYLA | EASNRAT | QQRGGWPIT | QYPMW | YIVPSGGRTYYADSVKG | DRAYGDYVGWNGFDY |
| M278-D08 | RASQSISSFLA | DASYRAT | QQRGNWPIT | QYPMW | YIVPSGGRTYYADSVKG | DRAYGDYVGWNGFDY |
| M281-E06 | RASQSLGRGDLA | GASSRAT | QQRSNWPPT | QYPMW | YIVPSGGRTYYADSVKG | DRAYGDYVGWNGFDY |
| M284-A06 | RASQSLGRSDLA | GVSNRVT | QQRSNWPST | QYPMW | YIVPSGGRTYYADSVKG | DRAYGDYVGWNGFDY |
| M283-B06 | RASQSLSGNYLA | GASSRAT | QQRSNWPIT | QYPMW | YIVPSGGRTYYADSVKG | DRAYGDYVGWNGFDY |
| M286-H01 | RASQSVARYLA | GASRRGT | QQRRKWPVT | QYPMW | YIVPSGGRTYYADSVKG | DRAYGDYVGWNGFDY |
| M294-C09 | RASQSVGADLA | HASTRAT | QQRGFWPIT | QYPMW | YIVPSGGRTYYADSVKG | DRAYGDYVGWNGFDY |
| M297-A02 | RASQSVGSDLA | GASTRAT | QQRRSWPPT | QYPMW | YIVPSGGRTYYADSVKG | DRAYGDYVGWNGFDY |
| M283-B05 | RASQSVGSDLA | GTSTRAT | QQRGNWPIT | QYPMW | YIVPSGGRTYYADSVKG | DRAYGDYVGWNGFDY |
| M295-A04 | RASQSVGSNFLA | GASSRAS | QQRSSWPIT | QYPMW | YIVPSGGRTYYADSVKG | DRAYGDYVGWNGFDY |
| M278-D02 | RASQSVNSNLA | EASNRAT | QQRAYWPVS | QYPMW | YIVPSGGRTYYADSVKG | DRAYGDYVGWNGFDY |
| M280-C11 | RASQSVSRHLA | GASNRAT | QQRYNWPIT | QYPMW | YIVPSGGRTYYADSVKG | DRAYGDYVGWNGFDY |
| M281-F10 | RASQSVSSDVA | GASARAT | QQRGNWPIT | QYPMW | YIVPSGGRTYYADSVKG | DRAYGDYVGWNGFDY |
| M297-G08 | RASQSVSSNLA | DASYRAT | QQRGNWPIT | QYPMW | YIVPSGGRTYYADSVKG | DRAYGDYVGWNGFDY |
| M279-G06 | RASQSVSSSHLA | GASNRAT | QQRRNWPPT | QYPMW | YIVPSGGRTYYADSVKG | DRAYGDYVGWNGFDY |
| M287-F09 | RASQSVSSSQIA | GASYRAT | QQRSNWPVT | QYPMW | YIVPSGGRTYYADSVKG | DRAYGDYVGWNGFDY |
| M279-C02 | RASQSVSSSQLA | GASNRAT | QQRSRWPIT | QYPMW | YIVPSGGRTYYADSVKG | DRAYGDYVGWNGFDY |
| M287-H12 | RASQSVSSSQLA | GASNRAT | QQRSNWPVT | QYPMW | YIVPSGGRTYYADSVKG | DRAYGDYVGWNGFDY |
| M278-E01 | RASQSVSSSQLA | GASSRAT | QQRGNWPIT | QYPMW | YIVPSGGRTYYADSVKG | DRAYGDYVGWNGFDY |
| M286-D06 | RASQSVSSSQLA | GASNRAT | QQRSNWPVT | QYPMW | YIVPSGGRTYYADSVKG | DRAYGDYVGWNGFDY |
| M283-G08 | RASQSVSSSYLA | DASSRAT | QQRHTWPIT | QYPMW | YIVPSGGRTYYADSVKG | DRAYGDYVGWNGFDY |
| M279-A11 | RASQSVDNHLA | GASTRAT | QQRRKWPVT | QYPMW | YIVPSGGRTYYADSVKG | DRAYGDYVGWNGFDY |
| M287-C11 | RASQPVGSYLA | GASNRAT | QQRSNWPIT | QYPMW | YIVPSGGRTYYADSVKG | DRAYGDYVGWNGFDY |
| M283-D05 | RASQSLGRSDLA | GVSNRAT | QQRSNWPVT | QYPMW | YIVPSGGRTYYADSVKG | DRAYGDYVGWNGFDY |
| M287-C05 | RASQSVSLYLA | GASSRAT | QQRGSWPIT | QYPMW | YIVPSGGRTYYADSVKG | DRAYGDYVGWNGFDY |
| M294-B11 | RASQDVNRYLA | GASTRAT | QQRSNWPIT | QYPMW | YIVPSGGRTYYADSVKG | DRAYGDYVGWNGFDY |
| M282-G10 | RASQSLNSDLA | GASTRAT | QQRRNWPIT | QYPMW | YIVPSGGRTYYADSVKG | DRAYGDYVGWNGFDY |
| M278-E08 | RASQSVGSDLA | GASTR | QQRGNWPIT | QYPMW | YIVPSGGRTYYADSVKG | DRAYGDYVGWNGFDY |
| M281-H01 | RASQSVSSNLA | GASTRAT | QQRGFWPIT | QYPMW | YIVPSGGRTYYADSVKG | DRAYGDYVGWNGFDY |
| M287-C07 | RASQTVSSRLLA | AASIRAT | QQRRSWPPT | QYPMW | YIVPSGGRTYYADSVKG | DRAYGDYVGWNGFDY |
| M293-E03 | RATQGIGTFLA | GASTLQS | QQRGNWPIT | QYPMW | YIVPSGGRTYYADSVKG | DRAYGDYVGWNGFDY |
| M286-B08 | RATQGIGTFLA | GASTLQS | QQRGNWPIT | QYPMW | YIVPSGGRTYYADSVKG | DRAYGDYVGWNGFDY |
| M282-D10 | RASQDISSYLA | GASTLQS | QQRGNWPIT | QYPMW | YIVPSGGRTYYADSVKG | DRAYGDYVGWNGFDY |
| M283-C03 | RASQGISSYLA | AASTLQS | QQRSNWPPS | QYPMW | YIVPSGGRTYYADSVKG | DRAYGDYVGWNGFDY |
| M287-G06 | RASQGIRNDVG | APSNLQS | LQDFDFPWT | QYPMW | YIVPSGGRTYYADSVKG | DRAYGDYVGWNGFDY |
| M281-C02 | RASQSISSFLA | DASYRAT | QQRGNWPIT | QYPMW | YIVPSGGRTYYADSVKG | DRAYGDYVGWNGFDY |
| M282-A06 | RASQSVNSDLA | AASTRAT | QQRRKWPVT | QYPMW | YIVPSGGRTYYADSVKG | DRAYGDYVGWNGFDY |
| M280-C07 | RASQGISTWLA | GASNRAT | QQRGNWPIT | QYPMW | YIVPSGGRTYYADSVKG | DRAYGDYVGWNGFDY |
| M287-G10 | RASQTISSWLA | KASSLQS | QQYSSWYT | QYPMW | YIVPSGGRTYYADSVKG | DRAYGDYVGWNGFDY |
| M278-D11 | RASQNVHTYLA | EASNRAT | QQRGGWPIT | QYPMW | YIVPSGGRTYYADSVKG | DRAYGDYVGWNGFDY |
| M287-F02 | RASQNIGSDLA | RASFRAT | QQRGFWPLT | QYPMW | YIVPSGGRTYYADSVKG | DRAYGDYVGWNGFDY |
| M269-C02 | RASQSISSFLA | DASYRAT | QQRGNWPIT | TYPMW | YISSSGGGTYYADSVKG | DRAYGDYVGWNGFDY |
| M277-C02 | RASQSISSFLA | DASYRAT | QQRGNWPIT | AYDMI | YIVPSGGFTDYADSVKG | DRAYGDYVGWNGFDY |
| M272-H08 | RASQSISSFLA | DASYRAT | QQRGNWPIT | AYDMW | VIYPSGGTTFYADSVKG | DRAYGDYVGWNGFDY |
| M271-D10 | RASQSISSFLA | DASYRAT | QQRGNWPIT | AYDMW | VIYSSGGMTLYADSVKG | DRAYGDYVGWNGFDY |
| M271-E12 | RASQSISSFLA | DASYRAT | QQRGNWPIT | AYDMW | YISSSGGFTDYADSVKG | DRAYGDYVGWNGFDY |
| M269-C06 | RASQSISSFLA | DASYRAT | QQRGNWPIT | AYEMW | SIYPSGGYTDYADSVKG | DRAYGDYVGWNGFDY |
| M271-G01 | RASQSISSFLA | DASYRAT | QQRGNWPIT | AYEMW | VIYPSGGGTFYADSVKG | DRAYGDYVGWNGFDY |
| M270-F03 | RASQSISSFLA | DASYRAT | QQRGNWPIT | AYMMW | AISPSGGYTGYADSVKG | DRAYGDYVGWNGFDY |
| M270-G04 | RASQSISSFLA | DASYRAT | QQRGNWPIT | AYNMI | YIVPSGGFTGYADSVKG | DRAYGDYVGWNGFDY |
| M268-E01 | RASQSISSFLA | DASYRAT | QQRGNWPIT | AYPMI | YIVPSGGATFYADSVKG | DRAYGDYVGWNGFDY |
| M269-E07 | RASQSISSFLA | DASYRAT | QQRGNWPIT | AYPMM | YIYPSGGGTFYADSVKG | DRAYGDYVGWNGFDY |
| M299-C10 | RASQSISSFLA | DASYRAT | QQRGNWPIT | AYPMW | YIVPSGGMTYYADSVKG | DRAYGDYVGWNGFDY |
| M274-D05 | RASQSISSFLA | DASYRAT | QQRGNWPIT | AYPMW | YIYPSGGATFYADSVKG | DRAYGDYVGWNGFDY |
| M300-F10 | RASQSISSFLA | DASYRAT | QQRGNWPIT | DYAMW | SIYPSGGATFYADSVKG | DRAYGDYVGWNGFDY |
| M269-D11 | RASQSISSFLA | DASYRAT | QQRGNWPIT | DYAMW | WISPSGGGTLYADSVKG | DRAYGDYVGWNGFDY |
| M271-D08 | RASQSISSFLA | DASYRAT | QQRGNWPIT | DYDMF | GIVSSGGYTGYADSVKG | DRAYGDYVGWNGFDY |
| M268-A12 | RASQSISSFLA | DASYRAT | QQRGNWPIT | DYDMW | VISPSGGYTGYADSVKG | DRAYGDYVGWNGFDY |
| M277-A06 | RASQSISSFLA | DASYRAT | QQRGNWPIT | DYDMW | VIYPSGGFTGYADSVKG | DRAYGDYVGWNGFDY |
| M272-E06 | RASQSISSFLA | DASYRAT | QQRGNWPIT | DYDMW | VIYSGGSTYYADSVKG | DRAYGDYVGWNGFDY |
| M271-A10 | RASQSISSFLA | DASYRAT | QQRGNWPIT | DYDMW | VIYSSGGFTSYADSVKG | DRAYGDYVGWNGFDY |
| M275-E06 | RASQSISSFLA | DASYRAT | QQRGNWPIT | DYDMW | VIYSSGGMTYYADSVKG | DRAYGDYVGWNGFDY |
| M277-E12 | RASQSISSFLA | DASYRAT | QQRGNWPIT | DYMMW | SISPSGGFTDYADSVKG | DRAYGDYVGWNGFDY |
| M269-B06 | RASQSISSFLA | DASYRAT | QQRGNWPIT | DYNMW | VIYPSGGWTMYADSVKG | DRAYGDYVGWNGFDY |
| M271-B04 | RASQSISSFLA | DASYRAT | QQRGNWPIT | DYPMF | YIVPSGGWTDYADSVKG | DRAYGDYVGWNGFDY |
| M306-C02 | RASQSISSFLA | DASYRAT | QQRGNWPIT | DYPMF | YIVPSGGWTSYADSVKG | DRAYGDYVGWNGFDY |
| M277-G06 | RASQSISSFLA | DASYRAT | QQRGNWPIT | DYPMI | YISPSGGYTDYADSVKG | DRAYGDYVGWNGFDY |
| M277-G04 | RASQSISSFLA | DASYRAT | QQRGNWPIT | DYPMI | YIVPSGGWTDYADSVKG | DRAYGDYVGWNGFDY |
| M298-C05 | RASQSISSFLA | DASYRAT | QQRGNWPIT | DYPMI | YIYPSGGGTYYADSVKG | DRAYGDYVGWNGFDY |
| M268-C12 | RASQSISSFLA | DASYRAT | QQRGNWPIT | DYPMW | YISSSGGWTSYADSVKG | DRAYGDYVGWNGFDY |
| M269-F03 | RASQSISSFLA | DASYRAT | QQRGNWPIT | DYPMW | YIYPSGGATYYADSVKG | DRAYGDYVGWNGFDY |
| M271-A08 | RASQSISSFLA | DASYRAT | QQRGNWPIT | DYQMW | VIYPSGGATFYADSVKG | DRAYGDYVGWNGFDY |
| M272-D08 | RASQSISSFLA | DASYRAT | QQRGNWPIT | EYDMW | VIYPSGGPTYYADSVKG | DRAYGDYVGWNGFDY |
| M275-G03 | RASQSISSFLA | DASYRAT | QQRGNWPIT | EYDMW | VIYSSGGYTGYADSVKG | DRAYGDYVGWNGFDY |
| M271-A11 | RASQSISSFLA | DASYRAT | QQRGNWPIT | EYEMW | VIYPSGGYTNYADSVKG | DRAYGDYVGWNGFDY |
| M269-G06 | RASQSISSFLA | DASYRAT | QQRGNWPIT | EYNMW | VIYPSGGPTWYADSVKG | DRAYGDYVGWNGFDY |
| M272-E03 | RASQSISSFLA | DASYRAT | QQRGNWPIT | EYPMF | YISPSGGWTSYADSVKG | DRAYGDYVGWNGFDY |
| M276-G10 | RASQSISSFLA | DASYRAT | QQRGNWPIT | EYPMI | YISPSGGYTGYADSVKG | DRAYGDYVGWNGFDY |
| M269-H08 | RASQSISSFLA | DASYRAT | QQRGNWPIT | EYPMW | SIYPSGGATFYADSVKG | DRAYGDYVGWNGFDY |
| M300-A11 | RASQSISSFLA | DASYRAT | QQRGNWPIT | EYWMW | SISPSGGGTFYADSVKG | DRAYGDYVGWNGFDY |
| M274-D02 | RASQSISSFLA | DASYRAT | QQRGNWPIT | FYDMF | VISSSGGGTFYADSVKG | DRAYGDYVGWNGFDY |
| M269-H01 | RASQSISSFLA | DASYRAT | QQRGNWPIT | FYDML | YISSSGGFTGYADSVKG | DRAYGDYVGWNGFDY |
| M272-D07 | RASQSISSFLA | DASYRAT | QQRGNWPIT | FYDMW | SIYSSGGATFYADSVKG | DRAYGDYVGWNGFDY |
| M271-A12 | RASQSISSFLA | DASYRAT | QQRGNWPIT | FYDMW | VIYSSGGATFYADSVKG | DRAYGDYVGWNGFDY |
| M270-G05 | RASQSISSFLA | DASYRAT | QQRGNWPIT | FYDMW | VIYSSGGFTDYADSVKG | DRAYGDYVGWNGFDY |
| M270-C10 | RASQSISSFLA | DASYRAT | QQRGNWPIT | FYDMW | YISSSGGGTFYADSVKG | DRAYGDYVGWNGFDY |
| M269-D09 | RASQSISSFLA | DASYRAT | QQRGNWPIT | FYDMY | SIVPSGGATFYADSVKG | DRAYGDYVGWNGFDY |
| M277-B07 | RASQSISSFLA | DASYRAT | QQRGNWPIT | FYEMW | YISPSGGGTYYADSVKG | DRAYGDYVGWNGFDY |
| M300-H04 | RASQSISSFLA | DASYRAT | QQRGNWPIT | FYHMI | YIYSSGGTFYADSVKG | DRAYGDYVGWNGFDY |
| M271-H08 | RASQSISSFLA | DASYRAT | QQRGNWPIT | FYMMW | SISPSGGATFYADSVKG | DRAYGDYVGWNGFDY |
| M306-H03 | RASQSISSFLA | DASYRAT | QQRGNWPIT | FYNMW | SISPSGGGTFYADSVKG | DRAYGDYVGWNGFDY |
| M275-F06 | RASQSISSFLA | DASYRAT | QQRGNWPIT | FYNMW | VIYPSGGKTYYADSVKG | DRAYGDYVGWNGFDY |
| M299-C08 | RASQSISSFLA | DASYRAT | QQRGNWPIT | FYNMW | VIYPSGGPTFYADSVKG | DRAYGDYVGWNGFDY |
| M274-D08 | RASQSISSFLA | DASYRAT | QQRGNWPIT | FYPMI | YISPSGGSTLYADSVKG | DRAYGDYVGWNGFDY |
| M303-H07 | RASQSISSFLA | DASYRAT | QQRGNWPIT | FYPMI | YISSSGGFTDYADSVKG | DRAYGDYVGWNGFDY |
| M272-C10 | RASQSISSFLA | DASYRAT | QQRGNWPIT | FYPMI | YISSSGGYTSYADSVKG | DRAYGDYVGWNGFDY |
| M269-C08 | RASQSISSFLA | DASYRAT | QQRGNWPIT | FYPML | YISGGYTGYADSVKG | DRAYGDYVGWNGFDY |
| M270-F07 | RASQSISSFLA | DASYRAT | QQRGNWPIT | FYPMM | YISFSGGYTGYADSVKG | DRAYGDYVGWNGFDY |
| M273-C10 | RASQSISSFLA | DASYRAT | QQRGNWPIT | FYPMW | YIYPSGGATFYADSVKG | DRAYGDYVGWNGFDY |
| M275-H08 | RASQSISSFLA | DASYRAT | QQRGNWPIT | GYDMW | VISPSGGGTFYADSVKG | DRAYGDYVGWNGFDY |
| M269-C11 | RASQSISSFLA | DASYRAT | QQRGNWPIT | GYDMW | VIYSSGGTTFYADSVKG | DRAYGDYVGWNGFDY |
| M304-B05 | RASQSISSFLA | DASYRAT | QQRGNWPIT | GYNMW | VIYPSGGATFYADSVKG | DRAYGDYVGWNGFDY |
| M276-F12 | RASQSISSFLA | DASYRAT | QQRGNWPIT | GYPMW | YISSSGGGTFYADSVKG | DRAYGDYVGWNGFDY |
| M299-D06 | RASQSISSFLA | DASYRAT | QQRGNWPIT | HYAMI | YIVPSGGWTDYADSVKG | DRAYGDYVGWNGFDY |
| M271-G12 | RASQSISSFLA | DASYRAT | QQRGNWPIT | HYAMI | YIVPSGGWTGYADSVKG | DRAYGDYVGWNGFDY |
| M272-G11 | RASQSISSFLA | DASYRAT | QQRGNWPIT | HYDMW | SISPSGGATFYADSVKG | DRAYGDYVGWNGFDY |
| M269-B12 | RASQSISSFLA | DASYRAT | QQRGNWPIT | HYDMW | VIVSSGKTFYADSVKG | DRAYGDYVGWNGFDY |
| M268-A01 | RASQSISSFLA | DASYRAT | QQRGNWPIT | HYDMW | VIYPSGGFTDYADSVKG | DRAYGDYVGWNGFDY |
| M277-B12 | RASQSISSFLA | DASYRAT | QQRGNWPIT | HYDMW | VIYPSGGHTLYADSVKG | DRAYGDYVGWNGFDY |
| M273-G07 | RASQSISSFLA | DASYRAT | QQRGNWPIT | HYDMW | VIYPSGGPTYYADSVKG | DRAYGDYVGWNGFDY |
| M274-F01 | RASQSISSFLA | DASYRAT | QQRGNWPIT | HYDMW | VIYPSGGVTYYADSVKG | DRAYGDYVGWNGFDY |
| M275-E12 | RASQSISSFLA | DASYRAT | QQRGNWPIT | HYDMW | VIYSSGGFTGYADSVKG | DRAYGDYVGWNGFDY |
| M298-E01 | RASQSISSFLA | DASYRAT | QQRGNWPIT | HYDMW | VIYSSGGPTYYADSVKG | DRAYGDYVGWNGFDY |
| M274-G10 | RASQSISSFLA | DASYRAT | QQRGNWPIT | HYDMW | YISPSGGFTSYADSVKG | DRAYGDYVGWNGFDY |
| M268-G01 | RASQSISSFLA | DASYRAT | QQRGNWPIT | HYEMW | SISSSGGGTFYADSVKG | DRAYGDYVGWNGFDY |
| M269-H02 | RASQSISSFLA | DASYRAT | QQRGNWPIT | HYEMW | YIGSSGGSTYYADSVKG | DRAYGDYVGWNGFDY |
| M277-G05 | RASQSISSFLA | DASYRAT | QQRGNWPIT | HYMMI | GISPSGGYTGYADSVKG | DRAYGDYVGWNGFDY |
| M271-H01 | RASQSISSFLA | DASYRAT | QQRGNWPIT | HYMMW | SIYPSGGGTYYADSVKG | DRAYGDYVGWNGFDY |
| M303-F06 | RASQSISSFLA | DASYRAT | QQRGNWPIT | HYMMW | SIYPSGGTYYADSVKG | DRAYGDYVGWNGFDY |
| M272-B03 | RASQSISSFLA | DASYRAT | QQRGNWPIT | HYPMF | YISSSGGWTDYADSVKG | DRAYGDYVGWNGFDY |
| M272-B04 | RASQSISSFLA | DASYRAT | QQRGNWPIT | HYPMI | YISPSGGGTFYADSVKG | DRAYGDYVGWNGFDY |
| M272-H03 | RASQSISSFLA | DASYRAT | QQRGNWPIT | HYPMI | YISSSGGGTFYADSVKG | DRAYGDYVGWNGFDY |
| M274-G12 | RASQSISSFLA | DASYRAT | QQRGNWPIT | HYPMI | YIYSSGGGTFYADSVKG | DRAYGDYVGWNGFDY |
| M274-F02 | RASQSISSFLA | DASYRAT | QQRGNWPIT | HYPML | YIYPSGGGTFYADSVKG | DRAYGDYVGWNGFDY |
| M276-H11 | RASQSISSFLA | DASYRAT | QQRGNWPIT | HYPMM | YISSSGGYTGYADSVKG | DRAYGDYVGWNGFDY |
| M303-C04 | RASQSISSFLA | DASYRAT | QQRGNWPIT | HYPMM | YIYSSGGGTYYADSVKG | DRAYGDYVGWNGFDY |
| M276-G09 | RASQSISSFLA | DASYRAT | QQRGNWPIT | HYPMV | YISPSGGYTGYADSVKG | DRAYGDYVGWNGFDY |
| M298-D05 | RASQSISSFLA | DASYRAT | QQRGNWPIT | HYPMW | SISPSGGATFYADSVKG | DRAYGDYVGWNGFDY |
| M305-G05 | RASQSISSFLA | DASYRAT | QQRGNWPIT | HYPMW | VIYSSGGGTFYADSVKG | DRAYGDYVGWNGFDY |
| M269-D03 | RASQSISSFLA | DASYRAT | QQRGNWPIT | HYPMW | WIVPSGGFTLYADSVKG | DRAYGDYVGWNGFDY |
| M275-A08 | RASQSISSFLA | DASYRAT | QQRGNWPIT | HYPMW | YIHPSGGGTLYADSVKG | DRAYGDYVGWNGFDY |
| M299-A12 | RASQSISSFLA | DASYRAT | QQRGNWPIT | HYPMW | YISSSGGGTFYADSVKG | DRAYGDYVGWNGFDY |
| M302-D10 | RASQSISSFLA | DASYRAT | QQRGNWPIT | HYPMW | YIVPSGGATFYADSVKG | DRAYGDYVGWNGFDY |
| M272-H12 | RASQSISSFLA | DASYRAT | QQRGNWPIT | HYPMW | YIYPSGGGTYYADSVKG | DRAYGDYVGWNGFDY |
| M304-G08 | RASQSISSFLA | DASYRAT | QQRGNWPIT | HYQMW | SISSSGGGTYYADSVKG | DRAYGDYVGWNGFDY |
| M298-A01 | RASQSISSFLA | DASYRAT | QQRGNWPIT | HYSMM | YISPSGGYTGYADSVKG | DRAYGDYVGWNGFDY |
| M272-E07 | RASQSISSFLA | DASYRAT | QQRGNWPIT | HYSMW | VIYPSGGATFYADSVKG | DRAYGDYVGWNGFDY |
| M268-F03 | RASQSISSFLA | DASYRAT | QQRGNWPIT | IYDMW | VISPSGGSTYYADSVKG | DRAYGDYVGWNGFDY |
| M268-B08 | RASQSISSFLA | DASYRAT | QQRGNWPIT | IYDMW | VIYPSGGATWYADSVKG | DRAYGDYVGWNGFDY |
| M271-A03 | RASQSISSFLA | DASYRAT | QQRGNWPIT | IYDMW | VIYPSGGPTFYADSVKG | DRAYGDYVGWNGFDY |
| M270-G02 | RASQSISSFLA | DASYRAT | QQRGNWPIT | IYDMW | VIYPSGGVTFYADSVKG | DRAYGDYVGWNGFDY |
| M277-H05 | RASQSISSFLA | DASYRAT | QQRGNWPIT | IYDMW | VIYSSGGFTGYADSVKG | DRAYGDYVGWNGFDY |
| M273-F04 | RASQSISSFLA | DASYRAT | QQRGNWPIT | IYPMI | YISPSGGYTSYADSVKG | DRAYGDYVGWNGFDY |
| M268-G10 | RASQSISSFLA | DASYRAT | QQRGNWPIT | IYPMW | YISPSGGFTSYADSVKG | DRAYGDYVGWNGFDY |
| M300-F01 | RASQSISSFLA | DASYRAT | QQRGNWPIT | IYPMW | YISPSGGGTYYADSVKG | DRAYGDYVGWNGFDY |
| M273-H03 | RASQSISSFLA | DASYRAT | QQRGNWPIT | IYPMW | YISSSGGWTDYADSVKG | DRAYGDYVGWNGFDY |
| M277-C11 | RASQSISSFLA | DASYRAT | QQRGNWPIT | IYPMW | YIVPSGGMTYYADSVKG | DRAYGDYVGWNGFDY |
| M273-G06 | RASQSISSFLA | DASYRAT | QQRGNWPIT | IYPMW | YIYPSGGGTFYADSVKG | DRAYGDYVGWNGFDY |
| M273-B10 | RASQSISSFLA | DASYRAT | QQRGNWPIT | KYAMI | WIPPSGGYTSYADSVKG | DRAYGDYVGWNGFDY |
| M272-F08 | RASQSISSFLA | DASYRAT | QQRGNWPIT | KYAMI | YISPSGGFTGYADSVKG | DRAYGDYVGWNGFDY |
| M270-G12 | RASQSISSFLA | DASYRAT | QQRGNWPIT | KYAMI | YISSSGGFTDYADSVKG | DRAYGDYVGWNGFDY |
| M274-H05 | RASQSISSFLA | DASYRAT | QQRGNWPIT | KYAMW | SISPSGGGTFYADSVKG | DRAYGDYVGWNGFDY |
| M271-F05 | RASQSISSFLA | DASYRAT | QQRGNWPIT | KYAMW | YIVPSGGRTFYADSVKG | DRAYGDYVGWNGFDY |
| M273-H08 | RASQSISSFLA | DASYRAT | QQRGNWPIT | KYDMF | SIVPSGGATYYADSVKG | DRAYGDYVGWNGFDY |
| M271-H02 | RASQSISSFLA | DASYRAT | QQRGNWPIT | KYDMI | WIGPSGGATMYADSVKG | DRAYGDYVGWNGFDY |
| M306-A12 | RASQSISSFLA | DASYRAT | QQRGNWPIT | KYDMI | YIGSSGGYTGYADSVKG | DRAYGDYVGWNGFDY |
| M271-B06 | RASQSISSFLA | DASYRAT | QQRGNWPIT | KYDMW | SISSSGGGTFYADSVKG | DRAYGDYVGWNGFDY |
| M271-D01 | RASQSISSFLA | DASYRAT | QQRGNWPIT | KYDMW | VIYPSGGPTFYADSVKG | DRAYGDYVGWNGFDY |
| M269-H03 | RASQSISSFLA | DASYRAT | QQRGNWPIT | KYDMW | VIYPSGGQTYYADSVKG | DRAYGDYVGWNGFDY |
| M274-E01 | RASQSISSFLA | DASYRAT | QQRGNWPIT | KYDMW | VIYPSGGSTYYADSVKG | DRAYGDYVGWNGFDY |
| M275-B12 | RASQSISSFLA | DASYRAT | QQRGNWPIT | KYDMW | VIYSSGGFTLYADSVKG | DRAYGDYVGWNGFDY |
| M270-H06 | RASQSISSFLA | DASYRAT | QQRGNWPIT | KYDMW | VIYSSGGFTSYADSVKG | DRAYGDYVGWNGFDY |
| M271-A04 | RASQSISSFLA | DASYRAT | QQRGNWPIT | KYDMW | VIYSSGGPTFYADSVKG | DRAYGDYVGWNGFDY |
| M272-C09 | RASQSISSFLA | DASYRAT | QQRGNWPIT | KYDMW | YIGPSGGFTDYADSVKG | DRAYGDYVGWNGFDY |
| M274-G09 | RASQSISSFLA | DASYRAT | QQRGNWPIT | KYDMW | YISSSGGFTDYADSVKG | DRAYGDYVGWNGFDY |
| M299-F05 | RASQSISSFLA | DASYRAT | QQRGNWPIT | KYDMW | YIVPSGGFIDYADSVKG | DRAYGDYVGWNGFDY |
| M275-B05 | RASQSISSFLA | DASYRAT | QQRGNWPIT | KYEMF | SISSSGGGTFYADSVKG | DRAYGDYVGWNGFDY |
| M271-H04 | RASQSISSFLA | DASYRAT | QQRGNWPIT | KYEMW | VIYPSGGMTYYADSVKG | DRAYGDYVGWNGFDY |
| M277-D11 | RASQSISSFLA | DASYRAT | QQRGNWPIT | KYEMW | VIYPSGGYTGYADSVKG | DRAYGDYVGWNGFDY |
| M268-B02 | RASQSISSFLA | DASYRAT | QQRGNWPIT | KYEMW | VIYSSGGKTYYADSVKG | DRAYGDYVGWNGFDY |
| M275-E04 | RASQSISSFLA | DASYRAT | QQRGNWPIT | KYEMW | YIGPSGGFTDYADSVKG | DRAYGDYVGWNGFDY |
| M275-D12 | RASQSISSFLA | DASYRAT | QQRGNWPIT | KYEMW | YIGPSGGITMYADSVKG | DRAYGDYVGWNGFDY |
| M270-A02 | RASQSISSFLA | DASYRAT | QQRGNWPIT | KYEMW | YISPSGGGTLYADSVKG | DRAYGDYVGWNGFDY |
| M277-F09 | RASQSISSFLA | DASYRAT | QQRGNWPIT | KYMMF | SIYSSGGRTFYADSVKG | DRAYGDYVGWNGFDY |
| M269-G12 | RASQSISSFLA | DASYRAT | QQRGNWPIT | KYNMW | SIYPSGGATFYADSVKG | DRAYGDYVGWNGFDY |
| M273-G04 | RASQSISSFLA | DASYRAT | QQRGNWPIT | KYNMW | VIYPSGGATFYADSVKG | DRAYGDYVGWNGFDY |
| M269-G04 | RASQSISSFLA | DASYRAT | QQRGNWPIT | KYPMF | YIVPSGGYTSYADSVKG | DRAYGDYVGWNGFDY |
| M269-B01 | RASQSISSFLA | DASYRAT | QQRGNWPIT | KYPMI | YISPSGGYTGYADSVKG | DRAYGDYVGWNGFDY |
| M268-B06 | RASQSISSFLA | DASYRAT | QQRGNWPIT | KYPMI | YISPSGGYTSYADSVKG | DRAYGDYVGWNGFDY |
| M272-A11 | RASQSISSFLA | DASYRAT | QQRGNWPIT | KYPMI | YISSSGGWTDYADSVKG | DRAYGDYVGWNGFDY |
| M274-H02 | RASQSISSFLA | DASYRAT | QQRGNWPIT | KYPMI | YIYPSGGATYYADSVKG | DRAYGDYVGWNGFDY |
| M275-C12 | RASQSISSFLA | DASYRAT | QQRGNWPIT | KYPMI | YIYPSGGYTSYADSVKG | DRAYGDYVGWNGFDY |
| M268-G12 | RASQSISSFLA | DASYRAT | QQRGNWPIT | KYPMI | YIYSSGGGTYYADSVKG | DRAYGDYVGWNGFDY |
| M271-C02 | RASQSISSFLA | DASYRAT | QQRGNWPIT | KYPMM | YISPSGGFTDYADSVKG | DRAYGDYVGWNGFDY |
| M268-E09 | RASQSISSFLA | DASYRAT | QQRGNWPIT | KYPMM | YIYPSGGYTDYADSVKG | DRAYGDYVGWNGFDY |
| M274-F09 | RASQSISSFLA | DASYRAT | QQRGNWPIT | KYPMM | YIYPSGGYTGYADSVKG | DRAYGDYVGWNGFDY |
| M271-F02 | RASQSISSFLA | DASYRAT | QQRGNWPIT | KYPMW | SIVSSGGATYYTDSVKG | DRAYGDYVGWNGFDY |
| M276-B12 | RASQSISSFLA | DASYRAT | QQRGNWPIT | KYPMW | SIYPSGGYTGYADSVKG | DRAYGDYVGWNGFDY |
| M272-H09 | RASQSISSFLA | DASYRAT | QQRGNWPIT | KYPMW | VISPSGGATYYADSVKG | DRAYGDYVGWNGFDY |
| M272-G02 | RASQSISSFLA | DASYRAT | QQRGNWPIT | KYPMW | VIYPSGGYTAYADSVKG | DRAYGDYVGWNGFDY |
| M274-E04 | RASQSISSFLA | DASYRAT | QQRGNWPIT | KYPMW | VIYSSGGGTFYADSVKG | DRAYGDYVGWNGFDY |
| M303-B07 | RASQSISSFLA | DASYRAT | QQRGNWPIT | KYPMW | YISPSGGGTLYADSVKG | DRAYGDYVGWNGFDY |
| M275-D06 | RASQSISSFLA | DASYRAT | QQRGNWPIT | KYPMW | YISPSGGGTYYADSVKG | DRAYGDYVGWNGFDY |
| M271-D04 | RASQSISSFLA | DASYRAT | QQRGNWPIT | KYPMW | YISSSGGGTYYADSVKG | DRAYGDYVGWNGFDY |
| M268-H03 | RASQSISSFLA | DASYRAT | QQRGNWPIT | KYPMW | YIVPSGGATFYADSVKG | DRAYGDYVGWNGFDY |
| M272-A03 | RASQSISSFLA | DASYRAT | QQRGNWPIT | KYPMW | YIVPSGGPTWYADSVKG | DRAYGDYVGWNGFDY |
| M274-G07 | RASQSISSFLA | DASYRAT | QQRGNWPIT | KYPMW | YIVPSGGWTAYADSVKG | DRAYGDYVGWNGFDY |
| M270-E01 | RASQSISSFLA | DASYRAT | QQRGNWPIT | KYQMW | SIYPSGGATFYADSVKG | DRAYGDYVGWNGFDY |
| M270-G09 | RASQSISSFLA | DASYRAT | QQRGNWPIT | KYQMW | SIYPSGGGTFYADSVKG | DRAYGDYVGWNGFDY |
| M272-B11 | RASQSISSFLA | DASYRAT | QQRGNWPIT | KYSMI | YIVPSGGYTGYADSVKG | DRAYGDYVGWNGFDY |
| M268-C03 | RASQSISSFLA | DASYRAT | QQRGNWPIT | KYSMW | SIYPSGGATFYADSVKG | DRAYGDYVGWNGFDY |
| M270-E10 | RASQSISSFLA | DASYRAT | QQRGNWPIT | KYSMW | VIYPSGGATFYADSVKG | DRAYGDYVGWNGFDY |
| M305-F06 | RASQSISSFLA | DASYRAT | QQRGNWPIT | KYSMW | VIYPSGGFTDYADSVKG | DRAYGDYVGWNGFDY |
| M270-H04 | RASQSISSFLA | DASYRAT | QQRGNWPIT | KYTMW | VIYPSGGATFYADSVKG | DRAYGDYVGWNGFDY |
| M269-D05 | RASQSISSFLA | DASYRAT | QQRGNWPIT | KYWMW | VIVPSGGMTYYADSVKG | DRAYGDYVGWNGFDY |
| M270-F02 | RASQSISSFLA | DASYRAT | QQRGNWPIT | KYYMW | SIYSSGGGTFYADSVKG | DRAYGDYVGWNGFDY |
| M275-D07 | RASQSISSFLA | DASYRAT | QQRGNWPIT | LYAMI | YISPSGGFTGYADSVKG | DRAYGDYVGWNGFDY |
| M273-E12 | RASQSISSFLA | DASYRAT | QQRGNWPIT | LYAMW | SIVPSGGKTYYADSVKG | DRAYGDYVGWNGFDY |
| M273-A09 | RASQSISSFLA | DASYRAT | QQRGNWPIT | LYAMW | YIYPSGGGTYYADSVKG | DRAYGDYVGWNGFDY |
| M271-G03 | RASQSISSFLA | DASYRAT | QQRGNWPIT | LYDML | YIYPSGGFTGYADSVKG | DRAYGDYVGWNGFDY |
| M299-F01 | RASQSISSFLA | DASYRAT | QQRGNWPIT | LYDMV | WIGPSGGLTIYADSVKG | DRAYGDYVGWNGFDY |
| M274-A03 | RASQSISSFLA | DASYRAT | QQRGNWPIT | LYDMW | SISSSGGYTGYADSVKG | DRAYGDYVGWNGFDY |
| M276-B04 | RASQSISSFLA | DASYRAT | QQRGNWPIT | LYDMW | VIRPSGGSTYYADSVKG | DRAYGDYVGWNGFDY |
| M269-B10 | RASQSISSFLA | DASYRAT | QQRGNWPIT | LYDMW | VIYPSGGPTYYADSVKG | DRAYGDYVGWNGFDY |
| M270-A05 | RASQSISSFLA | DASYRAT | QQRGNWPIT | LYDMW | VIYSSGGATFYADSVKG | DRAYGDYVGWNGFDY |
| M268-B11 | RASQSISSFLA | DASYRAT | QQRGNWPIT | LYDMW | VIYSSGGTTFYADSVKG | DRAYGDYVGWNGFDY |
| M272-F10 | RASQSISSFLA | DASYRAT | QQRGNWPIT | LYDMW | VIYSSGGYTAYADSVKG | DRAYGDYVGWNGFDY |
| M307-F04 | RASQSISSFLA | DASYRAT | QQRGNWPIT | LYDMW | VIYSSGGYTGYADSVKG | DRAYGDYVGWNGFDY |
| M274-F08 | RASQSISSFLA | DASYRAT | QQRGNWPIT | LYDMW | YIGPSGGNTLYADSVKG | DRAYGDYVGWNGFDY |
| M275-D11 | RASQSISSFLA | DASYRAT | QQRGNWPIT | LYEMW | VISPSGGGTYYADSVKG | DRAYGDYVGWNGFDY |
| M269-B03 | RASQSISSFLA | DASYRAT | QQRGNWPIT | LYEMW | YISSSGGGTLYADSVKG | DRAYGDYVGWNGFDY |
| M269-F10 | RASQSISSFLA | DASYRAT | QQRGNWPIT | LYMMW | SIYPSGGTYYADSVKG | DRAYGDYVGWNGFDY |
| M306-E11 | RASQSISSFLA | DASYRAT | QQRGNWPIT | LYNMW | VIYPSGGYTGYADSVKG | DRAYGDYVGWNGFDY |
| M271-B12 | RASQSISSFLA | DASYRAT | QQRGNWPIT | LYPMI | YISPSGGFTDYADSVKG | DRAYGDYVGWNGFDY |
| M304-E07 | RASQSISSFLA | DASYRAT | QQRGNWPIT | LYPMM | YIYPSGGGTFYADSVKG | DRAYGDYVGWNGFDY |
| M268-H02 | RASQSISSFLA | DASYRAT | QQRGNWPIT | LYPMW | SISPSGGATFYADSVKG | DRAYGDYVGWNGFDY |
| M301-B03 | RASQSISSFLA | DASYRAT | QQRGNWPIT | LYPMW | SISPSGGGTFYADSVKG | DRAYGDYVGWNGFDY |
| M306-D04 | RASQSISSFLA | DASYRAT | QQRGNWPIT | LYPMW | SIYPSGGATFYADSVKG | DRAYGDYVGWNGFDY |
| M270-D05 | RASQSISSFLA | DASYRAT | QQRGNWPIT | LYPMW | VIYSSGGATFYADSVKG | DRAYGDYVGWNGFDY |
| M269-C07 | RASQSISSFLA | DASYRAT | QQRGNWPIT | LYPMW | WIVPSGGFTLYADSVKG | DRAYGDYVGWNGFDY |
| M269-G10 | RASQSISSFLA | DASYRAT | QQRGNWPIT | LYPMW | YISPSGGGTLYADSVKG | DRAYGDYVGWNGFDY |
| M274-A12 | RASQSISSFLA | DASYRAT | QQRGNWPIT | LYPMW | YISSSGGGTYYADSVKG | DRAYGDYVGWNGFDY |
| M272-B10 | RASQSISSFLA | DASYRAT | QQRGNWPIT | LYPMW | YIVPSGGGTFYADSVKG | DRAYGDYVGWNGFDY |
| M302-A05 | RASQSISSFLA | DASYRAT | QQRGNWPIT | LYPMW | YIVSSGGATFYADSVKG | DRAYGDYVGWNGFDY |
| M273-D07 | RASQSISSFLA | DASYRAT | QQRGNWPIT | LYPMW | YIYPSGGATMYADSVKG | DRAYGDYVGWNGFDY |
| M274-C03 | RASQSISSFLA | DASYRAT | QQRGNWPIT | LYQMW | VIYPSGGATYYADSVKG | DRAYGDYVGWNGFDY |
| M272-E09 | RASQSISSFLA | DASYRAT | QQRGNWPIT | LYQMW | VIYPSGGTFYADSVKG | DRAYGDYVGWNGFDY |
| M298-G03 | RASQSISSFLA | DASYRAT | QQRGNWPIT | MYDMW | VISPSGGGTFYADSVKG | DRAYGDYVGWNGFDY |
| M268-E04 | RASQSISSFLA | DASYRAT | QQRGNWPIT | MYDMW | VIYPSGGNTLYADSVKG | DRAYGDYVGWNGFDY |
| M270-A08 | RASQSISSFLA | DASYRAT | QQRGNWPIT | MYDMW | VIYPSGGPTFYADSVKG | DRAYGDYVGWNGFDY |
| M268-C07 | RASQSISSFLA | DASYRAT | QQRGNWPIT | MYDMW | VIYPSGGYTAYADSVKG | DRAYGDYVGWNGFDY |
| M268-F02 | RASQSISSFLA | DASYRAT | QQRGNWPIT | MYDMW | VIYSSGGFTDYADSVKG | DRAYGDYVGWNGFDY |
| M271-A05 | RASQSISSFLA | DASYRAT | QQRGNWPIT | MYDMW | VIYSSGGPTFYADSVKG | DRAYGDYVGWNGFDY |
| M270-C12 | RASQSISSFLA | DASYRAT | QQRGNWPIT | MYDMW | VIYSSGGVTFYADSVKG | DRAYGDYVGWNGFDY |
| M272-A02 | RASQSISSFLA | DASYRAT | QQRGNWPIT | MYDMW | VIYSSGGYTAYADSVKG | DRAYGDYVGWNGFDY |
| M299-F03 | RASQSISSFLA | DASYRAT | QQRGNWPIT | MYDMW | VIYSSGGYTDYADSVKG | DRAYGDYVGWNGFDY |
| M272-F05 | RASQSISSFLA | DASYRAT | QQRGNWPIT | MYDMW | VIYSSGGYTNYADSVKG | DRAYGDYVGWNGFDY |
| M301-D12 | RASQSISSFLA | DASYRAT | QQRGNWPIT | MYDMW | VIYSSGGYTSYADSVKG | DRAYGDYVGWNGFDY |
| M276-B10 | RASQSISSFLA | DASYRAT | QQRGNWPIT | MYDMW | YISSSGGSTLYADSVKG | DRAYGDYVGWNGFDY |
| M270-B05 | RASQSISSFLA | DASYRAT | QQRGNWPIT | MYMMI | SIYPSGGFTSYADSVKG | DRAYGDYVGWNGFDY |
| M277-E11 | RASQSISSFLA | DASYRAT | QQRGNWPIT | MYNMW | SISPSGGATYYADSVKG | DRAYGDYVGWNGFDY |
| M304-E02 | RASQSISSFLA | DASYRAT | QQRGNWPIT | MYPII | YISPSGGFTGYADSVKG | DRAYGDYVGWNGFDY |
| M307-E12 | RASQSISSFLA | DASYRAT | QQRGNWPIT | MYPMF | YISPSGGWTAYADSVKG | DRAYGDYVGWNGFDY |
| M271-H07 | RASQSISSFLA | DASYRAT | QQRGNWPIT | MYPMF | YISPSGGWTDYADSVKG | DRAYGDYVGWNGFDY |
| M274-C01 | RASQSISSFLA | DASYRAT | QQRGNWPIT | MYPMF | YIVPSGGWTDYADSVKG | DRAYGDYVGWNGFDY |
| M268-D03 | RASQSISSFLA | DASYRAT | QQRGNWPIT | MYPMI | YISPSGGGTFYADSVKG | DRAYGDYVGWNGFDY |
| M272-H01 | RASQSISSFLA | DASYRAT | QQRGNWPIT | MYPMI | YIVPSGGFTGYADSVKG | DRAYGDYVGWNGFDY |
| M302-B06 | RASQSISSFLA | DASYRAT | QQRGNWPIT | MYPML | YISPSGGYTGYADSVKG | DRAYGDYVGWNGFDY |
| M270-B11 | RASQSISSFLA | DASYRAT | QQRGNWPIT | MYPMT | YISPSGGYTGYADSVKG | DRAYGDYVGWNGFDY |
| M277-A10 | RASQSISSFLA | DASYRAT | QQRGNWPIT | MYSMW | VIYPSGGFTDYADSVKG | DRAYGDYVGWNGFDY |
| M302-G12 | RASQSISSFLA | DASYRAT | QQRGNWPIT | MYWML | YISPSGGGTFYADSVKG | DRAYGDYVGWNGFDY |
| M276-C01 | RASQSISSFLA | DASYRAT | QQRGNWPIT | MYWMW | SISSSGGYTGYADSVKG | DRAYGDYVGWNGFDY |
| M276-E07 | RASQSISSFLA | DASYRAT | QQRGNWPIT | NYAMW | YISPSGATYYADSVKG | DRAYGDYVGWNGFDY |
| M268-C06 | RASQSISSFLA | DASYRAT | QQRGNWPIT | NYAMW | YISPSGGSTYYADSVKG | DRAYGDYVGWNGFDY |
| M273-F02 | RASQSISSFLA | DASYRAT | QQRGNWPIT | NYDMA | WISSSGGFTDYADSVKG | DRAYGDYVGWNGFDY |
| M270-B01 | RASQSISSFLA | DASYRAT | QQRGNWPIT | NYDMI | VISPSGGWTSYADSVKG | DRAYGDYVGWNGFDY |
| M276-G04 | RASQSISSFLA | DASYRAT | QQRGNWPIT | NYDMI | YIVPSGGYTAYADSVKG | DRAYGDYVGWNGFDY |
| M270-H01 | RASQSISSFLA | DASYRAT | QQRGNWPIT | NYDMW | VISPSGGFTGYADSVKG | DRAYGDYVGWNGFDY |
| M270-A10 | RASQSISSFLA | DASYRAT | QQRGNWPIT | NYDMW | VISSSGGYTGYADSVKG | DRAYGDYVGWNGFDY |
| M269-A01 | RASQSISSFLA | DASYRAT | QQRGNWPIT | NYDMW | VISSSGMTYYADSVKG | DRAYGDYVGWNGFDY |
| M271-E06 | RASQSISSFLA | DASYRAT | QQRGNWPIT | NYDMW | VIVPSGGATYYADSVKG | DRAYGDYVGWNGFDY |
| M271-F01 | RASQSISSFLA | DASYRAT | QQRGNWPIT | NYDMW | VIYPSGGATFYADSVKG | DRAYGDYVGWNGFDY |
| M271-E04 | RASQSISSFLA | DASYRAT | QQRGNWPIT | NYDMW | VIYPSGGITYYADSVKG | DRAYGDYVGWNGFDY |
| M305-H10 | RASQSISSFLA | DASYRAT | QQRGNWPIT | NYDMW | VIYPSGGPTYYADSVKG | DRAYGDYVGWNGFDY |
| M272-D03 | RASQSISSFLA | DASYRAT | QQRGNWPIT | NYDMW | VIYPSGGYTVYADSVKG | DRAYGDYVGWNGFDY |
| M270-E12 | RASQSISSFLA | DASYRAT | QQRGNWPIT | NYDMW | VIYSSGGPTYYADSVKG | DRAYGDYVGWNGFDY |
| M299-A04 | RASQSISSFLA | DASYRAT | QQRGNWPIT | NYDMW | VIYSSGGYTAYADSVKG | DRAYGDYVGWNGFDY |
| M269-C03 | RASQSISSFLA | DASYRAT | QQRGNWPIT | NYDMW | WISSSGGATIYADSVKG | DRAYGDYVGWNGFDY |
| M274-E09 | RASQSISSFLA | DASYRAT | QQRGNWPIT | NYDMW | YISSSGGATLYADSVKG | DRAYGDYVGWNGFDY |
| M269-E04 | RASQSISSFLA | DASYRAT | QQRGNWPIT | NYEMW | VIYSSGSATFYADSVKG | DRAYGDYVGWNGFDY |
| M271-F07 | RASQSISSFLA | DASYRAT | QQRGNWPIT | NYIMW | SIYPSGGATLYADSVKG | DRAYGDYVGWNGFDY |
| M272-F12 | RASQSISSFLA | DASYRAT | QQRGNWPIT | NYMMI | SIYPSGGYTGYADSVKG | DRAYGDYVGWNGFDY |
| M272-C01 | RASQSISSFLA | DASYRAT | QQRGNWPIT | NYMMI | SIYSSGGFTSYADSVKG | DRAYGDYVGWNGFDY |
| M275-B11 | RASQSISSFLA | DASYRAT | QQRGNWPIT | NYMMW | SIGPSGGGTFYADSVKG | DRAYGDYVGWNGFDY |
| M275-F12 | RASQSISSFLA | DASYRAT | QQRGNWPIT | NYMMW | SIYSSGGGTFYADSVKG | DRAYGDYVGWNGFDY |
| M268-C10 | RASQSISSFLA | DASYRAT | QQRGNWPIT | NYMMW | VISPSGGATYYADSVKG | DRAYGDYVGWNGFDY |
| M303-C05 | RASQSISSFLA | DASYRAT | QQRGNWPIT | NYNMM | YISSSGGYTGYADSVKG | DRAYGDYVGWNGFDY |
| M274-E08 | RASQSISSFLA | DASYRAT | QQRGNWPIT | NYNMW | VIYPSGGPTFYADSVKG | DRAYGDYVGWNGFDY |
| M276-D12 | RASQSISSFLA | DASYRAT | QQRGNWPIT | NYNMW | YISPSGGGTLYADSVKG | DRAYGDYVGWNGFDY |
| M299-A02 | RASQSISSFLA | DASYRAT | QQRGNWPIT | NYPMF | YISPSGGWTSYADSVKG | DRAYGDYVGWNGFDY |
| M268-C05 | RASQSISSFLA | DASYRAT | QQRGNWPIT | NYPMI | YISPSGGGTFYADSVKG | DRAYGDYVGWNGFDY |
| M276-H10 | RASQSISSFLA | DASYRAT | QQRGNWPIT | NYPMI | YISSSGGYTGYADSVKG | DRAYGDYVGWNGFDY |
| M270-F10 | RASQSISSFLA | DASYRAT | QQRGNWPIT | NYPMI | YIVPSGGFTSYADSVKG | DRAYGDYVGWNGFDY |
| M271-F12 | RASQSISSFLA | DASYRAT | QQRGNWPIT | NYPMI | YIYPSGGGTYYADSVKG | DRAYGDYVGWNGFDY |
| M301-H08 | RASQSISSFLA | DASYRAT | QQRGNWPIT | NYPMI | YIYPSGGTFYADSVKG | DRAYGDYVGWNGFDY |
| M304-D02 | RASQSISSFLA | DASYRAT | QQRGNWPIT | NYPMW | SISPSGGSTYYADSVKG | DRAYGDYVGWNGFDY |
| M268-G02 | RASQSISSFLA | DASYRAT | QQRGNWPIT | NYPMW | SIVPSGGATYYADSVKG | DRAYGDYVGWNGFDY |
| M271-D07 | RASQSISSFLA | DASYRAT | QQRGNWPIT | NYPMW | SIYPSGGATFYADSVKG | DRAYGDYVGWNGFDY |
| M269-F06 | RASQSISSFLA | DASYRAT | QQRGNWPIT | NYPMW | SIYPSGGKATYYADSVKG | DRAYGDYVGWNGFDY |
| M271-H11 | RASQSISSFLA | DASYRAT | QQRGNWPIT | NYPMW | SIYPSGGPTFYADSVKG | DRAYGDYVGWNGFDY |
| M275-F05 | RASQSISSFLA | DASYRAT | QQRGNWPIT | NYPMW | SIYSSGGATFYADSVKG | DRAYGDYVGWNGFDY |
| M300-H06 | RASQSISSFLA | DASYRAT | QQRGNWPIT | NYPMW | VIYPSGGYTAYADSVKG | DRAYGDYVGWNGFDY |
| M274-B07 | RASQSISSFLA | DASYRAT | QQRGNWPIT | NYPMW | YIGPSGGGTLYADSVKG | DRAYGDYVGWNGFDY |
| M269-A07 | RASQSISSFLA | DASYRAT | QQRGNWPIT | NYPMW | YIRPSGGPTWYADSVKG | DRAYGDYVGWNGFDY |
| M269-H04 | RASQSISSFLA | DASYRAT | QQRGNWPIT | NYPMW | YISPSGGGTFYADSVKG | DRAYGDYVGWNGFDY |
| M306-H02 | RASQSISSFLA | DASYRAT | QQRGNWPIT | NYPMW | YISPSGGGTLYADSVKG | DRAYGDYVGWNGFDY |
| M299-C09 | RASQSISSFLA | DASYRAT | QQRGNWPIT | NYPMW | YIVPSGGATFYADSVKG | DRAYGDYVGWNGFDY |
| M274-D06 | RASQSISSFLA | DASYRAT | QQRGNWPIT | NYPMW | YIVPSGGMTYYADSVKG | DRAYGDYVGWNGFDY |
| M303-C12 | RASQSISSFLA | DASYRAT | QQRGNWPIT | NYSMW | VIYPSGGYTSYADSVKG | DRAYGDYVGWNGFDY |
| M273-D11 | RASQSISSFLA | DASYRAT | QQRGNWPIT | NYYMI | YISPSGGGTYYADSVKG | DRAYGDYVGWNGFDY |
| M268-G04 | RASQSISSFLA | DASYRAT | QQRGNWPIT | PYAMW | YISSSGGGTFYADSVKG | DRAYGDYVGWNGFDY |
| M299-D01 | RASQSISSFLA | DASYRAT | QQRGNWPIT | PYDMW | VISPSGGATFYADSVKG | DRAYGDYVGWNGFDY |
| M303-G04 | RASQSISSFLA | DASYRAT | QQRGNWPIT | PYDMW | VISPSGGYTGYADSVKG | DRAYGDYVGWNGFDY |
| M271-C05 | RASQSISSFLA | DASYRAT | QQRGNWPIT | PYDMW | VISSSGGFTDYADSVKG | DRAYGDYVGWNGFDY |
| M271-F04 | RASQSISSFLA | DASYRAT | QQRGNWPIT | PYMMF | SISSSGGGTFYADSVKG | DRAYGDYVGWNGFDY |
| M275-E05 | RASQSISSFLA | DASYRAT | QQRGNWPIT | PYMMI | SISSSGGYTGYADSVKG | DRAYGDYVGWNGFDY |
| M269-H12 | RASQSISSFLA | DASYRAT | QQRGNWPIT | PYMMS | SIYSSGGATFYADSVKG | DRAYGDYVGWNGFDY |
| M270-C02 | RASQSISSFLA | DASYRAT | QQRGNWPIT | PYMMW | SISSSGGGTFYADSVKG | DRAYGDYVGWNGFDY |
| M272-F09 | RASQSISSFLA | DASYRAT | QQRGNWPIT | PYNMW | VIYPSGGATFYADSVKG | DRAYGDYVGWNGFDY |
| M275-F04 | RASQSISSFLA | DASYRAT | QQRGNWPIT | PYPMF | SISPSGGATYYADSVKG | DRAYGDYVGWNGFDY |
| M305-G11 | RASQSISSFLA | DASYRAT | QQRGNWPIT | PYPMI | YIGSSGGYTSYADSVKG | DRAYGDYVGWNGFDY |
| M269-C10 | RASQSISSFLA | DASYRAT | QQRGNWPIT | PYPMI | YISPSGGFTDYADSVKG | DRAYGDYVGWNGFDY |
| M277-A04 | RASQSISSFLA | DASYRAT | QQRGNWPIT | PYPMI | YISPSGGGTFYADSVKG | DRAYGDYVGWNGFDY |
| M274-G05 | RASQSISSFLA | DASYRAT | QQRGNWPIT | PYPMI | YISSSGGGTYYADSVKG | DRAYGDYVGWNGFDY |
| M271-F10 | RASQSISSFLA | DASYRAT | QQRGNWPIT | PYPMI | YISSSGGYTDYADSVKG | DRAYGDYVGWNGFDY |
| M301-E12 | RASQSISSFLA | DASYRAT | QQRGNWPIT | PYPMW | YISPSGGWTDYADSVKG | DRAYGDYVGWNGFDY |
| M271-C03 | RASQSISSFLA | DASYRAT | QQRGNWPIT | PYPMW | YIVPSGGKTFYADSVKG | DRAYGDYVGWNGFDY |
| M274-C08 | RASQSISSFLA | DASYRAT | QQRGNWPIT | QYAMI | YISPSGGYTGYADSVKG | DRAYGDYVGWNGFDY |
| M274-G04 | RASQSISSFLA | DASYRAT | QQRGNWPIT | QYDMI | YIGSSGGSTIYADSVKG | DRAYGDYVGWNGFDY |
| M274-B05 | RASQSISSFLA | DASYRAT | QQRGNWPIT | QYDMW | VISPSGGHTSYADSVKG | DRAYGDYVGWNGFDY |
| M270-D11 | RASQSISSFLA | DASYRAT | QQRGNWPIT | QYDMW | VISSSGGATWYADSVKG | DRAYGDYVGWNGFDY |
| M276-A01 | RASQSISSFLA | DASYRAT | QQRGNWPIT | QYDMW | VIYPSGGPTFYADSVKG | DRAYGDYVGWNGFDY |
| M269-F11 | RASQSISSFLA | DASYRAT | QQRGNWPIT | QYDMW | VIYPSGGTTFYADSVKG | DRAYGDYVGWNGFDY |
| M276-B07 | RASQSISSFLA | DASYRAT | QQRGNWPIT | QYDMW | VIYPSGGYTDYADSVKG | DRAYGDYVGWNGFDY |
| M275-D03 | RASQSISSFLA | DASYRAT | QQRGNWPIT | QYDMW | VIYPSGTTFYADSVKG | DRAYGDYVGWNGFDY |
| M268-F07 | RASQSISSFLA | DASYRAT | QQRGNWPIT | QYDMW | YIVPSGGFTDYADSVKG | DRAYGDYVGWNGFDY |
| M268-H01 | RASQSISSFLA | DASYRAT | QQRGNWPIT | QYGMW | YIYPSGGGTYYADSVKG | DRAYGDYVGWNGFDY |
| M271-B11 | RASQSISSFLA | DASYRAT | QQRGNWPIT | QYMMI | YIVPSGGTTGYADSVKG | DRAYGDYVGWNGFDY |
| M270-H12 | RASQSISSFLA | DASYRAT | QQRGNWPIT | QYPMF | YIVPSGGYTSYADSVKG | DRAYGDYVGWNGFDY |
| M273-C06 | RASQSISSFLA | DASYRAT | QQRGNWPIT | QYPMI | YIVPSGGWTSYADSVKG | DRAYGDYVGWNGFDY |
| M277-F05 | RASQSISSFLA | DASYRAT | QQRGNWPIT | QYPMM | YIYPSGGATYYADSVKG | DRAYGDYVGWNGFDY |
| M273-C12 | RASQSISSFLA | DASYRAT | QQRGNWPIT | QYPMM | YIYPSGGGTYYADSVKG | DRAYGDYVGWNGFDY |
| M275-F11 | RASQSISSFLA | DASYRAT | QQRGNWPIT | QYPMW | SISPSGGATYYADSVKG | DRAYGDYVGWNGFDY |
| M268-C02 | RASQSISSFLA | DASYRAT | QQRGNWPIT | QYPMW | SIYPSGGGTFYADSVKG | DRAYGDYVGWNGFDY |
| M269-D01 | RASQSISSFLA | DASYRAT | QQRGNWPIT | QYPMW | SIYSSGGATYYADSVKG | DRAYGDYVGWNGFDY |
| M270-C06 | RASQSISSFLA | DASYRAT | QQRGNWPIT | QYPMW | VIYPSGGFTSYADSVKG | DRAYGDYVGWNGFDY |
| M270-D09 | RASQSISSFLA | DASYRAT | QQRGNWPIT | QYPMW | VIYPSGGYTGYADSVKG | DRAYGDYVGWNGFDY |
| M275-F07 | RASQSISSFLA | DASYRAT | QQRGNWPIT | QYQMW | VIYPSGGATYYADSVKG | DRAYGDYVGWNGFDY |
| M277-D10 | RASQSISSFLA | DASYRAT | QQRGNWPIT | QYSMI | YIVPSGGYTSYADSVKG | DRAYGDYVGWNGFDY |
| M275-E02 | RASQSISSFLA | DASYRAT | QQRGNWPIT | QYSMW | SIVPSGGATFYADSVKG | DRAYGDYVGWNGFDY |
| M274-H10 | RASQSISSFLA | DASYRAT | QQRGNWPIT | QYSMW | VIYSSGGATFYADSVKG | DRAYGDYVGWNGFDY |
| M271-C06 | RASQSISSFLA | DASYRAT | QQRGNWPIT | QYSMW | VIYSSGSATFYADSVKG | DRAYGDYVGWNGFDY |
| M272-C06 | RASQSISSFLA | DASYRAT | QQRGNWPIT | QYWMW | VISSSGGGTYYADSVKG | DRAYGDYVGWNGFDY |
| M274-C02 | RASQSISSFLA | DASYRAT | QQRGNWPIT | QYWMW | VIVPSGGKTFYADSVKG | DRAYGDYVGWNGFDY |
| M274-G01 | RASQSISSFLA | DASYRAT | QQRGNWPIT | RYAMI | YISPSGGFTDYADSVKG | DRAYGDYVGWNGFDY |
| M268-F12 | RASQSISSFLA | DASYRAT | QQRGNWPIT | RYAMM | YISPSGGFTDYADSVKG | DRAYGDYVGWNGFDY |
| M268-F11 | RASQSISSFLA | DASYRAT | QQRGNWPIT | RYAMW | SIYPSGGGTFYADSVKG | DRAYGDYVGWNGFDY |
| M299-E06 | RASQSISSFLA | DASYRAT | QQRGNWPIT | RYAMW | YIVPSGGYTDYADSVKG | DRAYGDYVGWNGFDY |
| M273-B12 | RASQSISSFLA | DASYRAT | QQRGNWPIT | RYDMF | SISPSGGGTYYADSVKG | DRAYGDYVGWNGFDY |
| M298-A04 | RASQSISSFLA | DASYRAT | QQRGNWPIT | RYDMW | SISSSGGFTGYADSVKG | DRAYGDYVGWNGFDY |
| M273-A11 | RASQSISSFLA | DASYRAT | QQRGNWPIT | RYDMW | VISPSGGATFYADSVKG | DRAYGDYVGWNGFDY |
| M269-A05 | RASQSISSFLA | DASYRAT | QQRGNWPIT | RYDMW | VIYPSGGHTMYADSVKG | DRAYGDYVGWNGFDY |
| M270-C05 | RASQSISSFLA | DASYRAT | QQRGNWPIT | RYDMW | WISPSGGGTQYADSVKG | DRAYGDYVGWNGFDY |
| M269-F05 | RASQSISSFLA | DASYRAT | QQRGNWPIT | RYDMW | YIVPSGGFTSYADSVKG | DRAYGDYVGWNGFDY |
| M277-H07 | RASQSISSFLA | DASYRAT | QQRGNWPIT | RYHMW | YISPSGGSTLYADSVKG | DRAYGDYVGWNGFDY |
| M275-A06 | RASQSISSFLA | DASYRAT | QQRGNWPIT | RYMMI | GIYPSGGWTDYADSVKG | DRAYGDYVGWNGFDY |
| M268-B10 | RASQSISSFLA | DASYRAT | QQRGNWPIT | RYNMW | VIYPSGGATYYADSVKG | DRAYGDYVGWNGFDY |
| M270-H03 | RASQSISSFLA | DASYRAT | QQRGNWPIT | RYPMF | YISPSGGYTSYADSVKG | DRAYGDYVGWNGFDY |
| M276-A02 | RASQSISSFLA | DASYRAT | QQRGNWPIT | RYPMF | YIVPSGGYTDYADSVKG | DRAYGDYVGWNGFDY |
| M304-C09 | RASQSISSFLA | DASYRAT | QQRGNWPIT | RYPMI | YIYPSGGGTYYADSVKG | DRAYGDYVGWNGFDY |
| M271-B05 | RASQSISSFLA | DASYRAT | QQRGNWPIT | RYPMV | YISPSGGYTGYADSVKG | DRAYGDYVGWNGFDY |
| M270-C04 | RASQSISSFLA | DASYRAT | QQRGNWPIT | RYPMW | SISSSGGGTYYADSVKG | DRAYGDYVGWNGFDY |
| M268-G08 | RASQSISSFLA | DASYRAT | QQRGNWPIT | RYPMW | SIYPSGGATFYADSVKG | DRAYGDYVGWNGFDY |
| M269-E08 | RASQSISSFLA | DASYRAT | QQRGNWPIT | RYPMW | VIYPSGGATYYADSVKG | DRAYGDYVGWNGFDY |
| M276-F02 | RASQSISSFLA | DASYRAT | QQRGNWPIT | RYPMW | VIYPSGGTTFYADSVKG | DRAYGDYVGWNGFDY |
| M276-A10 | RASQSISSFLA | DASYRAT | QQRGNWPIT | RYPMW | VIYSSGGYTGYADSVKG | DRAYGDYVGWNGFDY |
| M304-D03 | RASQSISSFLA | DASYRAT | QQRGNWPIT | RYPMW | YIGSSGGGTFYADSVKG | DRAYGDYVGWNGFDY |
| M271-D11 | RASQSISSFLA | DASYRAT | QQRGNWPIT | RYPMW | YISPSGGGTLYADSVKG | DRAYGDYVGWNGFDY |
| M272-A08 | RASQSISSFLA | DASYRAT | QQRGNWPIT | RYPMW | YISPSGGMTSYADSVKG | DRAYGDYVGWNGFDY |
| M269-B07 | RASQSISSFLA | DASYRAT | QQRGNWPIT | RYPMW | YISSSGGGTFYADSVKG | DRAYGDYVGWNGFDY |
| M271-G08 | RASQSISSFLA | DASYRAT | QQRGNWPIT | RYPMW | YISSSGGGTLYADSVKG | DRAYGDYVGWNGFDY |
| M271-A02 | RASQSISSFLA | DASYRAT | QQRGNWPIT | RYPMW | YIVPSGGATYYADSVKG | DRAYGDYVGWNGFDY |
| M273-G11 | RASQSISSFLA | DASYRAT | QQRGNWPIT | RYPMW | YIVPSGGFTDYAHSVKG | DRAYGDYVGWNGFDY |
| M299-B04 | RASQSISSFLA | DASYRAT | QQRGNWPIT | RYPMW | YIVPSGGTTYYADSVKG | DRAYGDYVGWNGFDY |
| M275-E08 | RASQSISSFLA | DASYRAT | QQRGNWPIT | RYPMW | YIYPSGGATFYADSVKG | DRAYGDYVGWNGFDY |
| M275-B08 | RASQSISSFLA | DASYRAT | QQRGNWPIT | RYPMW | YIYSSGGKTFYADSVKG | DRAYGDYVGWNGFDY |
| M277-G09 | RASQSISSFLA | DASYRAT | QQRGNWPIT | RYSMW | SIYPSGGATFYADSVKG | DRAYGDYVGWNGFDY |
| M271-E01 | RASQSISSFLA | DASYRAT | QQRGNWPIT | RYSMW | VIYPSGGYTGYADSVKG | DRAYGDYVGWNGFDY |
| M275-F09 | RASQSISSFLA | DASYRAT | QQRGNWPIT | RYWMW | VIVPSGGATFYADSVKG | DRAYGDYVGWNGFDY |
| M269-D08 | RASQSISSFLA | DASYRAT | QQRGNWPIT | RYYMM | YISPSGGATYYADSVKG | DRAYGDYVGWNGFDY |
| M277-C12 | RASQSISSFLA | DASYRAT | QQRGNWPIT | SYDMI | WIGPSGGSTMYADSVKG | DRAYGDYVGWNGFDY |
| M274-F12 | RASQSISSFLA | DASYRAT | QQRGNWPIT | SYDMW | SISSSVGATYYADSVKG | DRAYGDYVGWNGFDY |
| M269-G01 | RASQSISSFLA | DASYRAT | QQRGNWPIT | SYDMW | VIGPSGGGTFYADSVKG | DRAYGDYVGWNGFDY |
| M269-F04 | RASQSISSFLA | DASYRAT | QQRGNWPIT | SYDMW | VISPSGGYTGYADSVKG | DRAYGDYVGWNGFDY |
| M269-E01 | RASQSISSFLA | DASYRAT | QQRGNWPIT | SYDMW | VIYPSGGRTYYADSVKG | DRAYGDYVGWNGFDY |
| M269-G07 | RASQSISSFLA | DASYRAT | QQRGNWPIT | SYDMW | VIYSSGGFTGYADSVKG | DRAYGDYVGWNGFDY |
| M268-C01 | RASQSISSFLA | DASYRAT | QQRGNWPIT | SYDMW | VIYSSGGTTFYADSVKG | DRAYGDYVGWNGFDY |
| M268-D06 | RASQSISSFLA | DASYRAT | QQRGNWPIT | SYDMW | VIYSSGGYTGYADSVKG | DRAYGDYVGWNGFDY |
| M272-G07 | RASQSISSFLA | DASYRAT | QQRGNWPIT | SYEMW | VIYSSGGATFYADSVKG | DRAYGDYVGWNGFDY |
| M303-F07 | RASQSISSFLA | DASYRAT | QQRGNWPIT | SYEMW | YISSSGGGTYYADSVKG | DRAYGDYVGWNGFDY |
| M275-B02 | RASQSISSFLA | DASYRAT | QQRGNWPIT | SYMMI | SISPSGGGTYYADSVKG | DRAYGDYVGWNGFDY |
| M269-C01 | RASQSISSFLA | DASYRAT | QQRGNWPIT | SYMMI | SISPSGGWTSYADSVKG | DRAYGDYVGWNGFDY |
| M268-H04 | RASQSISSFLA | DASYRAT | QQRGNWPIT | SYMMI | SIYPSGGYTSYADSVKG | DRAYGDYVGWNGFDY |
| M277-H08 | RASQSISSFLA | DASYRAT | QQRGNWPIT | SYNMW | SISPSGGGTYYADSVKG | DRAYGDYVGWNGFDY |
| M274-B02 | RASQSISSFLA | DASYRAT | QQRGNWPIT | SYPMI | YISSSGGFTDYADSVKG | DRAYGDYVGWNGFDY |
| M268-E03 | RASQSISSFLA | DASYRAT | QQRGNWPIT | SYPMM | YIYSSGGGTFYADSVKG | DRAYGDYVGWNGFDY |
| M302-G11 | RASQSISSFLA | DASYRAT | QQRGNWPIT | SYPMW | SISPSGGGTYYADSVKG | DRAYGDYVGWNGFDY |
| M270-G08 | RASQSISSFLA | DASYRAT | QQRGNWPIT | SYPMW | SISPSGMTYYADSVKG | DRAYGDYVGWNGFDY |
| M268-E08 | RASQSISSFLA | DASYRAT | QQRGNWPIT | SYPMW | SIYPSGGGTFYADSVKG | DRAYGDYVGWNGFDY |
| M270-E05 | RASQSISSFLA | DASYRAT | QQRGNWPIT | SYPMW | YISSSGGGTYYADSVKG | DRAYGDYVGWNGFDY |
| M271-A01 | RASQSISSFLA | DASYRAT | QQRGNWPIT | SYPMW | YIVPSGGATFYADSVKG | DRAYGDYVGWNGFDY |
| M270-C03 | RASQSISSFLA | DASYRAT | QQRGNWPIT | SYPMW | YIVPSGGSTLYADSVKG | DRAYGDYVGWNGFDY |
| M275-A09 | RASQSISSFLA | DASYRAT | QQRGNWPIT | SYPMW | YIVPSGGYTYYADSVKG | DRAYGDYVGWNGFDY |
| M298-D08 | RASQSISSFLA | DASYRAT | QQRGNWPIT | SYQMW | SIYPSGGATFYADSVKG | DRAYGDYVGWNGFDY |
| M274-A09 | RASQSISSFLA | DASYRAT | QQRGNWPIT | SYSMW | VIYSSGGYTGYADSVKG | DRAYGDYVGWNGFDY |
| M269-E06 | RASQSISSFLA | DASYRAT | QQRGNWPIT | TYAMI | YIGPSGGFTDYADSVKG | DRAYGDYVGWNGFDY |
| M269-H06 | RASQSISSFLA | DASYRAT | QQRGNWPIT | TYAMW | YISPSGGGTFYADSVKG | DRAYGDYVGWNGFDY |
| M276-E11 | RASQSISSFLA | DASYRAT | QQRGNWPIT | TYDMF | SISSSGGATFYADSVKG | DRAYGDYVGWNGFDY |
| M271-E11 | RASQSISSFLA | DASYRAT | QQRGNWPIT | TYDMI | YISPSGGYTGYADSVKG | DRAYGDYVGWNGFDY |
| M270-A04 | RASQSISSFLA | DASYRAT | QQRGNWPIT | TYDMI | YISSSGGFTDYADSVKG | DRAYGDYVGWNGFDY |
| M268-F10 | RASQSISSFLA | DASYRAT | QQRGNWPIT | TYDMW | VIYPSGGPTYYADSVKG | DRAYGDYVGWNGFDY |
| M275-A02 | RASQSISSFLA | DASYRAT | QQRGNWPIT | TYDMW | YISSSGGGTFYADSVKG | DRAYGDYVGWNGFDY |
| M272-C08 | RASQSISSFLA | DASYRAT | QQRGNWPIT | TYEMW | YISSSGGGTGYADSVKG | DRAYGDYVGWNGFDY |
| M277-F06 | RASQSISSFLA | DASYRAT | QQRGNWPIT | TYPMF | YISPSGGYTDYADSVKG | DRAYGDYVGWNGFDY |
| M272-B07 | RASQSISSFLA | DASYRAT | QQRGNWPIT | TYPMI | YIVPSGGYTGYADSVKG | DRAYGDYVGWNGFDY |
| M276-E12 | RASQSISSFLA | DASYRAT | QQRGNWPIT | TYPMM | YIYPSGGATFYADSVKG | DRAYGDYVGWNGFDY |
| M299-D12 | RASQSISSFLA | DASYRAT | QQRGNWPIT | TYPMW | SISPSGGATYYADSVKG | DRAYGDYVGWNGFDY |
| M273-F01 | RASQSISSFLA | DASYRAT | QQRGNWPIT | TYPMW | SIVPSGGATYYADSVKG | DRAYGDYVGWNGFDY |
| M271-C07 | RASQSISSFLA | DASYRAT | QQRGNWPIT | TYPMW | VIYSSGGYTGYADSVKG | DRAYGDYVGWNGFDY |
| M269-H10 | RASQSISSFLA | DASYRAT | QQRGNWPIT | TYPMW | YISPSGGATFYADSVKG | DRAYGDYVGWNGFDY |
| M268-B07 | RASQSISSFLA | DASYRAT | QQRGNWPIT | TYPMW | YISPSGGGTFYADSVKG | DRAYGDYVGWNGFDY |
| M277-G07 | RASQSISSFLA | DASYRAT | QQRGNWPIT | TYPMW | YIVPSGGYTDYADSVKG | DRAYGDYVGWNGFDY |
| M273-F06 | RASQSISSFLA | DASYRAT | QQRGNWPIT | TYPMW | YIYPSGGGTFYADSVKG | DRAYGDYVGWNGFDY |
| M274-E07 | RASQSISSFLA | DASYRAT | QQRGNWPIT | TYQMW | SIYSSGGTFYADSVKG | DRAYGDYVGWNGFDY |
| M276-F04 | RASQSISSFLA | DASYRAT | QQRGNWPIT | TYSMI | YISPSGGFTDYADSVKG | DRAYGDYVGWNGFDY |
| M270-A06 | RASQSISSFLA | DASYRAT | QQRGNWPIT | VYDMI | YIGPSGGMTLYADSVKG | DRAYGDYVGWNGFDY |
| M274-G08 | RASQSISSFLA | DASYRAT | QQRGNWPIT | VYDMW | VIYPSGGATYYADSVKG | DRAYGDYVGWNGFDY |
| M274-D12 | RASQSISSFLA | DASYRAT | QQRGNWPIT | VYDMW | VIYPSGGYTDYADSVKG | DRAYGDYVGWNGFDY |
| M304-E10 | RASQSISSFLA | DASYRAT | QQRGNWPIT | VYDMW | VIYSSGGATFYADSVKG | DRAYGDYVGWNGFDY |
| M268-A02 | RASQSISSFLA | DASYRAT | QQRGNWPIT | VYDMW | VIYSSGGPTFYADSVKG | DRAYGDYVGWNGFDY |
| M272-B06 | RASQSISSFLA | DASYRAT | QQRGNWPIT | VYDMW | YISPSGGFTDYADSVKG | DRAYGDYVGWNGFDY |
| M268-D04 | RASQSISSFLA | DASYRAT | QQRGNWPIT | VYEMW | YISPSGGGTFYADSVKG | DRAYGDYVGWNGFDY |
| M298-G07 | RASQSISSFLA | DASYRAT | QQRGNWPIT | VYNMW | SISPSGGGTFYADSVKG | DRAYGDYVGWNGFDY |
| M276-E09 | RASQSISSFLA | DASYRAT | QQRGNWPIT | VYPMW | SISPSGGATYYADSVKG | DRAYGDYVGWNGFDY |
| M269-B04 | RASQSISSFLA | DASYRAT | QQRGNWPIT | VYPMW | SISPSGGYTGYADSVKG | DRAYGDYVGWNGFDY |
| M299-D07 | RASQSISSFLA | DASYRAT | QQRGNWPIT | VYPMW | SISSGGATYYADSVKG | DRAYGDYVGWNGFDY |
| M304-G02 | RASQSISSFLA | DASYRAT | QQRGNWPIT | VYPMW | WISPSGGGTFYADSVKG | DRAYGDYVGWNGFDY |
| M268-D05 | RASQSISSFLA | DASYRAT | QQRGNWPIT | VYPMW | WISSSGGGTAYADSVKG | DRAYGDYVGWNGFDY |
| M275-G10 | RASQSISSFLA | DASYRAT | QQRGNWPIT | VYPMW | YIVPSGGATYYADSVKG | DRAYGDYVGWNGFDY |
| M276-G02 | RASQSISSFLA | DASYRAT | QQRGNWPIT | VYPMW | YIYPSGGATYYADSVKG | DRAYGDYVGWNGFDY |
| M274-D10 | RASQSISSFLA | DASYRAT | QQRGNWPIT | VYQMW | VIYPSGGTTFYADSVKG | DRAYGDYVGWNGFDY |
| M274-E12 | RASQSISSFLA | DASYRAT | QQRGNWPIT | VYWMI | YISPSGGGTFYADSVKG | DRAYGDYVGWNGFDY |
| M301-A06 | RASQSISSFLA | DASYRAT | QQRGNWPIT | WYAMW | SISPSGGGTYYADSVKG | DRAYGDYVGWNGFDY |
| M268-F01 | RASQSISSFLA | DASYRAT | QQRGNWPIT | WYDMF | SISPSGGATFYADSVKG | DRAYGDYVGWNGFDY |
| M268-D08 | RASQSISSFLA | DASYRAT | QQRGNWPIT | WYDMW | VIYPSGGATYYADSVKG | DRAYGDYVGWNGFDY |
| M268-B04 | RASQSISSFLA | DASYRAT | QQRGNWPIT | WYDMW | VIYPSGGFTDYADSVKG | DRAYGDYVGWNGFDY |
| M270-B04 | RASQSISSFLA | DASYRAT | QQRGNWPIT | WYDMW | VIYPSGGYTGYADSVKG | DRAYGDYVGWNGFDY |
| M268-D07 | RASQSISSFLA | DASYRAT | QQRGNWPIT | WYDMW | VIYSSGGATFYADSVKG | DRAYGDYVGWNGFDY |
| M276-F11 | RASQSISSFLA | DASYRAT | QQRGNWPIT | WYDMW | VIYSSGGPTFYADSVKG | DRAYGDYVGWNGFDY |
| M274-D03 | RASQSISSFLA | DASYRAT | QQRGNWPIT | WYEMW | WISPSGGGTQYADSVKG | DRAYGDYVGWNGFDY |
| M274-H06 | RASQSISSFLA | DASYRAT | QQRGNWPIT | WYEMW | YISPSGGGTYYADSVKG | DRAYGDYVGWNGFDY |
| M270-D07 | RASQSISSFLA | DASYRAT | QQRGNWPIT | WYNMW | VIYPSGGGTFYADSVKG | DRAYGDYVGWNGFDY |
| M274-F11 | RASQSISSFLA | DASYRAT | QQRGNWPIT | WYNMW | YIVSSGGFTDYADSVKG | DRAYGDYVGWNGFDY |
| M275-B07 | RASQSISSFLA | DASYRAT | QQRGNWPIT | WYPMI | YISSSGGYTSYADSVKG | DRAYGDYVGWNGFDY |
| M274-C07 | RASQSISSFLA | DASYRAT | QQRGNWPIT | WYPMT | YISPSGGYTGYADSVKG | DRAYGDYVGWNGFDY |
| M275-H02 | RASQSISSFLA | DASYRAT | QQRGNWPIT | WYPMV | YIYPSGGGTFYADSVKG | DRAYGDYVGWNGFDY |
| M276-B06 | RASQSISSFLA | DASYRAT | QQRGNWPIT | WYPMW | SISPSGGATYYADSVKG | DRAYGDYVGWNGFDY |
| M305-H03 | RASQSISSFLA | DASYRAT | QQRGNWPIT | WYPMW | SIVPSGGATYYADSVKG | DRAYGDYVGWNGFDY |
| M272-G03 | RASQSISSFLA | DASYRAT | QQRGNWPIT | WYPMW | VIYPSGGYTSYADSVKG | DRAYGDYVGWNGFDY |
| M268-G05 | RASQSISSFLA | DASYRAT | QQRGNWPIT | WYPMW | VIYSSGGATFYADSVKG | DRAYGDYVGWNGFDY |
| M303-H08 | RASQSISSFLA | DASYRAT | QQRGNWPIT | WYPMW | VIYSSGGYTGYADSVKG | DRAYGDYVGWNGFDY |
| M271-C10 | RASQSISSFLA | DASYRAT | QQRGNWPIT | WYPMW | YIVPSGGATFYADSVKG | DRAYGDYVGWNGFDY |
| M274-B03 | RASQSISSFLA | DASYRAT | QQRGNWPIT | WYPMW | YIVPSGGRTYYADSVKG | DRAYGDYVGWNGFDY |
| M277-B08 | RASQSISSFLA | DASYRAT | QQRGNWPIT | WYSMW | VIYPSGGGTFYADSVKG | DRAYGDYVGWNGFDY |
| M273-D09 | RASQSISSFLA | DASYRAT | QQRGNWPIT | WYTMW | SISPSGGGTYYADSVKG | DRAYGDYVGWNGFDY |
| M273-C04 | RASQSISSFLA | DASYRAT | QQRGNWPIT | WYYMI | YISPSGGGTYYADSVKG | DRAYGDYVGWNGFDY |
| M275-H04 | RASQSISSFLA | DASYRAT | QQRGNWPIT | YYDMI | WISPSGGLTMYADSVKG | DRAYGDYVGWNGFDY |
| M271-G11 | RASQSISSFLA | DASYRAT | QQRGNWPIT | YYDMI | YIVPSGGYTSYADSVKG | DRAYGDYVGWNGFDY |
| M271-F08 | RASQSISSFLA | DASYRAT | QQRGNWPIT | YYDMV | YISPSGGFTLYADSVKG | DRAYGDYVGWNGFDY |
| M268-D01 | RASQSISSFLA | DASYRAT | QQRGNWPIT | YYDMW | SISPSGGFTGYADSVKG | DRAYGDYVGWNGFDY |
| M304-E11 | RASQSISSFLA | DASYRAT | QQRGNWPIT | YYDMW | VISSSGGGTFYADSVKG | DRAYGDYVGWNGFDY |
| M301-B04 | RASQSISSFLA | DASYRAT | QQRGNWPIT | YYDMW | VIYPSGGTTFYADSVKG | DRAYGDYVGWNGFDY |
| M301-A09 | RASQSISSFLA | DASYRAT | QQRGNWPIT | YYDMW | VIYPSGGYTAYADSVKG | DRAYGDYVGWNGFDY |
| M268-H12 | RASQSISSFLA | DASYRAT | QQRGNWPIT | YYDMW | YISSSGGGTYYADSVKG | DRAYGDYVGWNGFDY |
| M273-H09 | RASQSISSFLA | DASYRAT | QQRGNWPIT | YYEMW | YISSSGGFTSYADSVKG | DRAYGDYVGWNGFDY |
| M303-A02 | RASQSISSFLA | DASYRAT | QQRGNWPIT | YYGMW | VISPSGGGTFYADSVKG | DRAYGDYVGWNGFDY |
| M273-G09 | RASQSISSFLA | DASYRAT | QQRGNWPIT | YYMMI | GIVSSGGFTMYADSVKG | DRAYGDYVGWNGFDY |
| M274-A08 | RASQSISSFLA | DASYRAT | QQRGNWPIT | YYMMW | SISSSGGGTFYADSVKG | DRAYGDYVGWNGFDY |
| M268-H06 | RASQSISSFLA | DASYRAT | QQRGNWPIT | YYMMW | SIYSSGGATFYADSVKG | DRAYGDYVGWNGFDY |
| M273-F05 | RASQSISSFLA | DASYRAT | QQRGNWPIT | YYNMW | SISPSGGGTYYADSVKG | DRAYGDYVGWNGFDY |
| M268-E02 | RASQSISSFLA | DASYRAT | QQRGNWPIT | YYPMF | YISPSGGWTDYADSVKG | DRAYGDYVGWNGFDY |
| M271-E09 | RASQSISSFLA | DASYRAT | QQRGNWPIT | YYPMI | WISPSGGGTQYADSVKG | DRAYGDYVGWNGFDY |
| M275-G05 | RASQSISSFLA | DASYRAT | QQRGNWPIT | YYPMV | YIWPSGGTYYADSVKG | DRAYGDYVGWNGFDY |
| M277-G02 | RASQSISSFLA | DASYRAT | QQRGNWPIT | YYPMW | SIVPSGGATFYADSVKG | DRAYGDYVGWNGFDY |
| M270-H05 | RASQSISSFLA | DASYRAT | QQRGNWPIT | YYPMW | VIYPSGGATFYADSVKG | DRAYGDYVGWNGFDY |
| M273-A06 | RASQSISSFLA | DASYRAT | QQRGNWPIT | YYPMW | YISSSGGGTHYADSVKG | DRAYGDYVGWNGFDY |
| M276-F08 | RASQSISSFLA | DASYRAT | QQRGNWPIT | YYPMW | YIVPSGGATFYADSVKG | DRAYGDYVGWNGFDY |

TABLE 80
Abs that bind MMP-9 but do not inhibit

M0076-D03-LC
SEQ ID NO:__
QDIQMTQSPSSLSASVGDRVTITC RASQGIRNDLD WYQQKPGTAPKR
LIY SASNLQS GVPSRFSGSGSGTEFTLTISNLQPEDLATYFC LQHN
SFPLTFGQGTKVEIK
M0076-D03-HC
SEQ ID NO:__
EVQLLESGGGLVQPGGSLRLSCAASGFTFS LYRMN WVRQAPGKGLEW
VS YIGSSGGATAYADSVKG RFTISRDNSKNTLYLQMNSLRAEDTAVY
YCARGAWYLDS WGQGTLVTVSS
M0078-G07-LC
SEQ ID NO:__
QDIQMTQSPGTLSVSPGERATLSC RASQSVSSDLA WYQHKPGQAPRL
LIY GVSTKAT GVPARFSGSGSGTEFTLTISSLQSEDLAVYYC QQYH
NWPPLTFGGGTKVEIK
M0078-G07-HC
SEQ ID NO:__
EVQLLESGGGLVQPGGSLRLSCAASGFTFS SYTME WVRQAPGKGLEW
VS WISPSGGYTFYADSVKG RFTISRDNSKNTLYLQMNSLRAEDTALY
YCARGYSYGSIDL WGRGTLVTVSS

VL and VH for Fabs Affinity Matured for Binding to hMMP9, hMMP2, mMMP9, and mMMP2

| LC for Fab M265-C07 | |
|---|---|
| (SEQ ID NO: 6) | |
| QDIQMTQSPA TLSLSPGERA SLSCRASQNV ARFLAWYQQK PGQAPRLLIY SASNRATGVP | 60 |
| DRFSGSGSGT DFTLTISSLE PEDFAVYFCQ QRGNWPITFG QGTRLEIK | 108 |
| HC for Fab M265-C07 | |
| (SEQ ID NO: 7) | |
| EVQLLESGGG LVQPGGSLRL SCAASGFTFS QYPMWWVRQA PGKGLEWVSY IVPSGGRTYY | 60 |
| ADSVKGRFTI SRDNSKNTLY LQMNSLRAED TAVYYCAKDR AYGDYVGWNG FDYWGQGTLV | 120 |
| TVSS | 124 |
| LC for Fab M265-A07 | |
| (SEQ ID NO: 8) | |
| QDIQMTQSPA TLSLSPGERA TLSCRASQNV HTYLAWYQQK PGQAPRLLIS EASNRATGVP | 60 |
| ARFTGSGSGI DFSLSISSLE PEDFAIYYCQ QRGGWPITFG GGTKVEIK | 108 |
| HC for Fab M265-A07 | |
| (SEQ ID NO: 9) | |
| EVQLLESGGG LVQPGGSLRL SCAASGFTFS QYPMWWVRQA PGKGLEWVSY IVPSGGRTYY | 60 |
| ADSVKGRFTI SRDNSKNTLY LQMNSLRAED TAVYYCAKDR AYGDYVGWNG FDYWGQGTLV | 120 |
| TVSS | 124 |
| LC for Fab M256-D03 | |
| (SEQ ID NO: 10) | |
| QDIQMTQSPA TLSLSPGERA TLSCRASQSI SSFLAWYQQK PGQAPRLLIY DASYRATGIP | 60 |
| ARFSGSGSGT DFTLTISSLE PEDYAVYYCQ QRGNWPITFG QGTRLEIK | 108 |
| HC for Fab M256-D03 | |
| (SEQ ID NO: 11) | |
| EVQLLESGGG LVQPGGSLRL SCAASGFTFS VYPMIWVRQA PGKGLEWVSY ISPSGGFTGY | 60 |
| ADSVKGRFTI SRDNSKNTLY LQMNSLRAED TAVYYCAKDR AYGDYVGWNG FDYWGQGTLV | 120 |
| TVSS | 124 |
| LC for Fab M256-E10 | |
| (SEQ ID NO: 12) | |
| QDIQMTQSPA TLSLSPGERA TLSCRASQSI SSFLAWYQQK PGQAPRLLIY DASYRATGIP | 60 |
| ARFSGSGSGT DFTLTISSLE PEDYAVYYCQ QRGNWPITFG QGTRLEIK | 108 |
| HC for Fab M256-E10 | |
| (SEQ ID NO: 13) | |
| EVQLLESGGG LVQPGGSLRL SCAASGFTFS DYPMWWVRQA PGKGLEWVSV IYPSGGATFY | 60 |
| ADSVKGRFTI SRDNSKNTLY LQMNSLRAED TAVYYCAKDR AYGDYVGWNG FDYWGQGTLV | 120 |
| TVSS | 124 |
| LC for Fab M256-E03 | |
| (SEQ ID NO: 14) | |
| QDIQMTQSPA TLSLSPGERA TLSCRASQSI SSFLAWYQQK PGQAPRLLIY DASYRATGIP | 60 |
| ARFSGSGSGT DFTLTISSLE PEDYAVYYCQ QRGNWPITFG QGTRLEIK | 108 |
| HC for Fab M256-E03 | |
| (SEQ ID NO: 15) | |
| EVQLLESGGG LVQPGGSLRL SCAASGFTFS TYPMIWVRQA PGKGLEWVSY ISPSGGYTGY | 60 |
| ADSVKGRFTI SRDNSKNTLY LQMNSLRAED TAVYYCAKDR AYGDYVGWNG FDYWGQGTLV | 120 |
| TVSS | 124 |
| LC for Fab M256-D11 | |
| (SEQ ID NO: 16) | |
| QDIQMTQSPA TLSLSPGERA TLSCRASQSI SSFLAWYQQK PGQAPRLLIY DASYRATGIP | 60 |
| ARFSGSGSGT DFTLTISSLE PEDYAVYYCQ QRGNWPITFG QGTRLEIK | 108 |
| HC for Fab M256-D11 | |
| (SEQ ID NO: 17) | |
| EVQLLESGGG LVQPGGSLRL SCAASGFTFS HYDMWWVRQA PGKGLEWVSV IYSSGGPTFY | 60 |
| ADSVKGRFTI SRDNSKNTLY LQMNSLRAED TAVYYCAKDR AYGDYVGWNG FDYWGQGTLV | 120 |
| TVSS | 124 |
| LC for Fab M256-A04 | |
| (SEQ ID NO: 18) | |
| QDIQMTQSPA TLSLSPGERA TLSCRASQSI SSFLAWYQQK PGQAPRLLIY DASYRATGIP | 60 |
| ARFSGSGSGT DFTLTISSLE PEDYAVYYCQ QRGNWPITFG QGTRLEIK | 108 |
| HC for Fab M256-A04 | |
| (SEQ ID NO: 19) | |
| EVQLLESGGG LVQPGGSLRL SCAASGFTFS HYPMWWVRQA PGKGLEWVSS ISPSGGATYY | 60 |
| ADSVKGRFTI SRDNSKNTLY LQMNSLRAED TAVYYCAKDR AYGDYVGWNG FDYWGQGTLV | 120 |
| TVSS | 124 |
| LC for Fab M256-G09 | |
| (SEQ ID NO: 20) | |
| QDIQMTQSPA TLSLSPGERA TLSCRASQSI SSFLAWYQQK PGQAPRLLIY DASYRATGIP | 60 |
| ARFSGSGSGT DFTLTISSLE PEDYAVYYCQ QRGNWPITFG QGTRLEIK | 108 |
| HC for Fab M256-G09 | |
| (SEQ ID NO: 21) | |
| EVQLLESGGG LVQPGGSLRL SCAASGFTFS KYPMWWVRQA PGKGLEWVSS IYPSGGATFY | 60 |
| ADSVKGRFTI SRDNSKNTLY LQMNSLRAED TAVYYCAKDR AYGDYVGWNG FDYWGQGTLV | 120 |
| TVSS | 124 |
| LC for Fab M256-A07 | |
| (SEQ ID NO: 22) | |
| QDIQMTQSPA TLSLSPGERA TLSCRASQSI SSFLAWYQQK PGQAPRLLIY DASYRATGIP | 60 |
| ARFSGSGSGT DFTLTISSLE PEDYAVYYCQ QRGNWPITFG QGTRLEIK | 108 |
| HC for Fab M256-A07 | |
| (SEQ ID NO: 23) | |
| EVQLLESGGG LVQPGGSLRL SCAASGFTFS HYDMLWVRQA PGKGLEWVSY ISSSGGYTGY | 60 |
| ADSVKGRFTI SRDNSKNTLY LQMNSLRAED TAVYYCAKDR AYGDYVGWNG FDYWGQGTLV | 120 |
| TVSS | 124 |
| LC for Fab M256-C09 | |
| (SEQ ID NO: 24) | |
| QDIQMTQSPA TLSLSPGERA TLSCRASQSI SSFLAWYQQK PGQAPRLLIY DASYRATGIP | 60 |
| ARFSGSGSGT DFTLTISSLE PEDYAVYYCQ QRGNWPITFG QGTRLEIK | 108 |
| HC for Fab M256-C09 | |
| (SEQ ID NO: 25) | |
| EVQLLESGGG LVQPGGSLRL SCAASGFTFS KYPMWWVRQA PGKGLEWVSY ISSSGGGTFY | 60 |
| ADSVKGRFTI SRDNSKNTLY LQMNSLRAED TAVYYCAKDR AYGDYVGWNG FDYWGQGTLV | 120 |
| TVSS | 124 |
| LC for Fab M256-C07 | |
| (SEQ ID NO: 26) | |
| QDIQMTQSPA TLSLSPGERA TLSCRASQSI SSFLAWYQQK PGQAPRLLIY DASYRATGIP | 60 |
| ARFSGSGSGT DFTLTISSLE PEDYAVYYCQ QRGNWPITFG QGTRLEIK | 108 |
| HC for Fab M256-C07 | |
| (SEQ ID NO: 27) | |
| EVQLLESGGG LVQPGGSLRL SCAASGFTFS LYDMWWVRQA PGKGLEWVSY ISSSGGATFY | 60 |
| ADSVKGRFTI SRDNSKNTLY LQMNSLRAED TAVYYCAKDR AYGDYVGWNG FDYWGQGTLV | 120 |
| TVSS | 124 |
| LC for Fab M256-B03 | |
| (SEQ ID NO: 28) | |
| QDIQMTQSPA TLSLSPGERA TLSCRASQSI SSFLAWYQQK PGQAPRLLIY DASYRATGIP | 60 |
| ARFSGSGSGT DFTLTISSLE PEDYAVYYCQ QRGNWPITFG QGTRLEIK | 108 |
| HC for Fab M256-B03 | |
| (SEQ ID NO: 29) | |
| EVQLLESGGG LVQPGGSLRL SCAASGFTFS RYPMWWVRQA PGKGLEWVSY ISPSGGFTSY | 60 |
| ADSVKGRFTI SRDNSKNTLY LQMNSLRAED TAVYYCAKDR AYGDYVGWNG FDYWGQGTLV | 120 |
| TVSS | 124 |
| LC for Fab M266-E02 | |
| (SEQ ID NO: 30) | |
| QDIQMTQSPA TLSLSPGETA ILSCRASQSV GRFLAWYQQK PGQAPRLLIY GASSRATGIP | 60 |
| DRFSGSGSGT DFSLTISRLE PEDFAVYYCQ QRGNWPITFG QGTRLEIK | 108 |
| HC for Fab M266-E02 | |
| (SEQ ID NO: 31) | |
| EVQLLESGGG LVQPGGSLRL SCAASGFTFS QYPMWWVRQA PGKGLEWVSY IVPSGGRTYY | 60 |
| ADSVKGRFTI SRDNSKNTLY LQMNSLRAED TAVYYCAKDR AYGDYVGWNG FDYWGQGTLV | 120 |
| TVSS | 124 |
| LC for Fab M266-D03 | |
| (SEQ ID NO: 32) | |
| QDIQMTQSPA TLSVSPGERA TLSCRASQNI GSDLAWYQHK PGQGPRLLIY GASSRATGIP | 60 |
| DRFSGSGSGT DFTLTISSLE PEDFAVYFCQ QRGNWPITFG QGTRLEIK | 108 |
| HC for Fab M266-D03 | |
| (SEQ ID NO: 33) | |
| EVQLLESGGG LVQPGGSLRL SCAASGFTFS QYPMWWVRQA PGKGLEWVSY IVPSGGRTYY | 60 |
| ADSVKGRFTI SRDNSKNTLY LQMNSLRAED TAVYYCAKDR AYGDYVGWNG FDYWGQGTLV | 120 |
| TVSS | 124 |
| LC for Fab M263-F05 | |
| (SEQ ID NO: 34) | |
| QDIQMTQSPG TLSLSPGERA TLSCRASQSV GNFLAWYQQK PGQAPRLLIY GASNRATGIP | 60 |
| DRFSGSGSGT DFTLTISRLE PEDFAVYFCQ QRGNWPITFG QGTRLEIK | 108 |
| HC for Fab M263-F05 | |
| (SEQ ID NO: 35) | |
| EVQLLESGGG LVQPGGSLRL SCAASGFTFS QYPMWWVRQA PGKGLEWVSY IVPSGGRTYY | 60 |
| ADSVKGRFTI SRDNSKNTLY LQMNSLRAED TAVYYCAKDR AYGDYVGWNG FDYWGQGTLV | 120 |
| TVSS | 124 |
| LC for Fab M264-A09 | |
| (SEQ ID NO: 36) | |
| QDIQMTQSPS SVSASTGDRV IISCRASQVI FSGLAWYQQK PGKAPKLLIS AASNLQSGVP | 60 |
| ARFSGSGSGT YFTLTISSLQ PEDFATYYCQ QAQTFPFTFG PGTKVDVQ | 108 |
| HC for Fab M264-A09 | |
| (SEQ ID NO: 37) | |
| EVQLLESGGG LVQPGGSLRL SCAASGFTFS QYPMWWVRQA PGKGLEWVSY IVPSGGRTYY | 60 |
| ADSVKGRFTI SRDNSKNTLY LQMNSLRAED TAVYYCAKDR AYGDYVGWNG FDYWGQGTLV | 120 |
| TVSS | 124 |
| LC for Fab M263-F01 | |
| (SEQ ID NO: 38) | |
| QDIQMTQSPS SVSASVGDRV TITCRASQNI GRWLAWYQQK PGQAPNLLIY GASSLQTGVP | 60 |
| SRFSGSGSGT DFSLTISSLQ PEDFAVYYCQ QRRKWPVTFG GGTKVEIK | 108 |
| HC for Fab M263-F01 | |
| (SEQ ID NO: 39) | |
| EVQLLESGGG LVQPGGSLRL SCAASGFTFS QYPMWWVRQA PGKGLEWVSY IVPSGGRTYY | 60 |
| ADSVKGRFTI SRDNSKNTLY LQMNSLRAED TAVYYCAKDR AYGDYVGWNG FDYWGQGTLV | 120 |
| TVSS | 124 |
| LC for Fab M265-A04 | |
| (SEQ ID NO: 40) | |
| QDIQMTQSPV TLSVSPGERA TLSCRASQNI GSDLAWYQQQ PGQAPRLLIY RASFRATGIP | 60 |
| ARFSGSGSGT DFTLTISSLQ SEDFAVYYCQ QRGNWPPTFG GGTKVEIR | 108 |
| HC for Fab M265-A04 | |
| (SEQ ID NO: 41) | |
| EVQLLESGGG LVQPGGSLRL SCAASGFTFS QYPMWWVRQA PGKGLEWVSY IVPSGGRTYY | 60 |
| ADSVKGRFTI SRDNSKNTLY LQMNSLRAED TAVYYCAKDR AYGDYVGWNG FDYWGQGTLV | 120 |
| TVSS | 124 |
| LC for Fab M278-C09 | |
| (SEQ ID NO: 42) | |
| QDIQMTQFPA TLSLSPGERA TLSCRASQSI SSFLAWYQQK PGQAPRLLIY DASYRATGIP | 60 |
| ARFSGSGSGT DFTLTISSLE PEDYAVYYCQ QRGNWPITFG QGTRLEIK | 108 |
| HC for Fab M278-C09 | |
| (SEQ ID NO: 43) | |
| EVQLLESGGG LVQPGGSLRL SCAASGFTFS QYPMWWVRQA PGKGLEWVSY IVPSGGRTYY | 60 |
| ADSVKGRFTI SRDNSKNTLY LQMNSLRAED TAVYYCAKDR AYGDYVGWNG FDYWGQGTLV | 120 |
| TVSS | 124 |
| LC for Fab M279-H01 | |
| (SEQ ID NO: 46) | |
| QDIQMTQSPA FLSASLGDRV TITCRATQGI GTFLAWYQQK AGRAPKLLIY GASTLQSGVP | 60 |
| SRFSGSGSGT EFTLTISSLQ PEDFATYYCQ QRYTWPITFG QGTRLEIR | 108 |
| HC for Fab M279-H01 | |
| (SEQ ID NO: 47) | |
| EVQLLESGGG LVQPGGSLRL SCAASGFTFS QYPMWWVRQA PGKGLEWVSY IVPSGGRTYY | 60 |
| ADSVKGRFTI SRDNSKNTLY LQMNSLRAED TAVYYCAKDR AYGDYVGWNG FDYWGQGTLV | 120 |
| TVSS | 124 |
| LC for Fab M280-G04 | |
| (SEQ ID NO: 48) | |
| QDIQMTQSPA TLPVSPGETV TLSCTASQSV GSHLAWYQQR PNQAPRLLIY DTSSRATGIP | 60 |
| ARFSGSGSGT DFTLTITSLE PEDFAVYYCQ QRRSWPLTFG GGTKVEIK | 108 |
| HC for Fab M280-G04 | |
| (SEQ ID NO: 49) | |
| EVQLLESGGG LVQPGGSLRL SCAASGFTFS QYPMWWVRQA PGKGLEWVSY IVPSGGRTYY | 60 |
| ADSVKGRFTI SRDNSKNTLY LQMNSLRAED TAVYYCAKDR AYGDYVGWNG FDYWGQGTLV | 120 |
| TVSS | 124 |
| LC for Fab M281-C08 | |
| (SEQ ID NO: 50) | |
| QDIQMTQSPA TLSASPGERA TLSCRASQSV SSDLAWYQQK PGQAPRLLIY GASTRATGIP | 60 |
| ARFSGSGSGT EFTLTISSLE PEDFALYYCQ QRAYWPVSFG GGTKVEIK | 108 |
| HC for Fab M281-C08 | |
| (SEQ ID NO: 51) | |
| EVQLLESGGG LVQPGGSLRL SCAASGFTFS QYPMWWVRQA PGKGLEWVSY IVPSGGRTYY | 60 |
| ADSVKGRFTI SRDNSKNTLY LQMNSLRAED TAVYYCAKDR AYGDYVGWNG FDYWGQGTLV | 120 |
| TVSS | 124 |
| LC for Fab M287-C10 | |
| (SEQ ID NO: 52) | |
| QDIQMTQSPA TLSFSAGERA TLSCRASQHI YTSLAWYQHK AGQAPRLLIY EASYRATGIP | 60 |
| ARFSGSGSGR DFTLTISSLE PEDVAVYYCQ QRGSWPITFG QGTRLEIK | 108 |
| HC for Fab M287-C10 | |
| (SEQ ID NO: 53) | |
| EVQLLESGGG LVQPGGSLRL SCAASGFTFS QYPMWWVRQA PGKGLEWVSY IVPSGGRTYY | 60 |
| ADSVKGRFTI SRDNSKNTLY LQMNSLRAED TAVYYCAKDR AYGDYVGWNG FDYWGQGTLV | 120 |
| TVSS | 124 |
| LC for Fab M281-H08 | |
| (SEQ ID NO: 54) | |
| QDIQMTQSPA TLSLSAGERA TLSCRASQSV SSYLAWYQQK PGQAPRLLIY GASTRATGIP | 60 |
| ARFSGGGSGT EFTLTISSLE PEDFAVYFCQ QRGFWPITFG QGTRLEIK | 108 |
| HC for Fab M281-H08 | |
| (SEQ ID NO: 55) | |
| EVQLLESGGG LVQPGGSLRL SCAASGFTFS QYPMWWVRQA PGKGLEWVSY IVPSGGRTYY | 60 |
| ADSVKGRFTI SRDNSKNTLY LQMNSLRAED TAVYYCAKDR AYGDYVGWNG FDYWGQGTLV | 120 |
| TVSS | 124 |
| LC for Fab M292-E02 | |
| (SEQ ID NO: 56) | |
| QDIQMTQSPA TLSLSPGDRA TLSCRASQSV SSYLAWYQQK PGQAPRLLIY GASNRATGIP | 60 |
| ARFSGSGSGT DFTLTISSLE PEDYAVYYCQ QRGNWPITFG QGTRLEIK | 108 |
| HC for Fab M292-E02 | |
| (SEQ ID NO: 57) | |
| EVQLLESGGG LVQPGGSLRL SCAASGFTFS QYPMWWVRQA PGKGLEWVSY IVPSGGRTYY | 60 |
| ADSVKGRFTI SRDNSKNTLY LQMNSLRAED TAVYYCAKDR AYGDYVGWNG FDYWGQGTLV | 120 |
| TVSS | 124 |
| LC for Fab M290-B12 | |
| (SEQ ID NO: 58) | |
| QDIQMTQSPA TLSLSPGDWA TLSCRASQSV SSVAWYQQKP GQAPRLLIYD TSNRATGIPD | 60 |
| RFSGSGSGTD FTLTISRLEP EDFAVYYCQQ RTKWPITFGQ GTRLEIK | 107 |
| HC for Fab M290-B12 | |
| (SEQ ID NO: 59) | |
| EVQLLESGGG LVQPGGSLRL SCAASGFTFS QYPMWWVRQA PGKGLEWVSY IVPSGGRTYY | 60 |
| ADSVKGRFTI SRDNSKNTLY LQMNSLRAED TAVYYCAKDR AYGDYVGWNG FDYWGQGTLV | 120 |
| TVSS | 124 |
| LC for Fab M279-B07 | |
| (SEQ ID NO: 60) | |
| QDIQMTQSPA TLSLSPGEGA TLSCRASESV GMYIAWYQQK PGQAPRLLMY GASNRATGIP | 60 |
| ARFRGSGSGT DFTLTISSLE PEDFAVYYCQ QRGNWPITFG QGTRLEIK | 108 |
| HC for Fab M279-B07 | |
| (SEQ ID NO: 61) | |
| EVQLLESGGG LVQPGGSLRL SCAASGFTFS QYPMWWVRQA PGKGLEWVSY IVPSGGRTYY | 60 |
| ADSVKGRFTI SRDNSKNTLY LQMNSLRAED TAVYYCAKDR AYGDYVGWNG FDYWGQGTLV | 120 |
| TVSS | 124 |
| LC for Fab M296-E03 | |
| (SEQ ID NO: 62) | |
| QDIQMTQSPA TLSLSPGERA TLSCGASQSV SSSYLAWYQQ KPGLAPRLLI YDASSRATGI | 60 |
| PDRFSGSGSG TDFTLTISRL EPEDFAVYYC QQYGSSPWTF GPGTTLDFN | 109 |
| HC for Fab M296-E03 | |
| (SEQ ID NO: 63) | |
| EVQLLESGGG LVQPGGSLRL SCAASGFTFS QYPMWWVRQA PGKGLEWVSY IVPSGGRTYY | 60 |
| ADSVKGRFTI SRDNSKNTLY LQMNSLRAED TAVYYCAKDR AYGDYVGWNG FDYWGQGTLV | 120 |
| TVSS | 124 |
| LC for Fab M282-B10 | |
| (SEQ ID NO: 64) | |
| QDIQMTQSPA TLSLSPGERA TLSCRASPSI SNFLAWYQQR PGQAPRLLIY GASNRATGVP | 60 |
| ARFSGSGSGT DFNLTISSVE PEDFAVYYCQ QRRSWPPTFG QGTKLETK | 108 |
| HC for Fab M282-B10 | |
| (SEQ ID NO: 65) | |
| EVQLLESGGG LVQPGGSLRL SCAASGFTFS QYPMWWVRQA PGKGLEWVSY IVPSGGRTYY | 60 |
| ADSVKGRFTI SRDNSKNTLY LQMNSLRAED TAVYYCAKDR AYGDYVGWNG FDYWGQGTLV | 120 |
| TVSS | 124 |
| LC for Fab M283-D07 | |
| (SEQ ID NO: 66) | |
| QDIQMTQSPA TLSLSPGERA TLSCRASQNI GGYLAWYQQK PGQAPRLLIY GASNRATGVP | 60 |
| ARFSGSGSGT DFSLIISSLE TEDFAVYYCQ QRSNWPPTFG GGTKVEIK | 108 |
| HC for Fab M283-D07 | |
| (SEQ ID NO: 67) | |
| EVQLLESGGG LVQPGGSLRL SCAASGFTFS QYPMWWVRQA PGKGLEWVSY IVPSGGRTYY | 60 |
| ADSVKGRFTI SRDNSKNTLY LQMNSLRAED TAVYYCAKDR AYGDYVGWNG FDYWGQGTLV | 120 |
| TVSS | 124 |
| LC for Fab M289-B05 | |
| (SEQ ID NO: 68) | |
| QDIQMTQSPA TLSLSPGERA TLSCRASQNV ANYLDWYQQK PGQAPRLLIY DGSNRATGVP | 60 |
| DRFRGSGSET DFTLIISSLE PEDFAVYYCQ QRHSWPPITF GQGTRLQIK | 109 |
| HC for Fab M289-B05 | |
| (SEQ ID NO: 69) | |
| EVQLLESGGG LVQPGGSLRL SCAASGFTFS QYPMWWVRQA PGKGLEWVSY IVPSGGRTYY | 60 |
| ADSVKGRFTI SRDNSKNTLY LQMNSLRAED TAVYYCAKDR AYGDYVGWNG FDYWGQGTLV | 120 |
| TVSS | 124 |
| LC for Fab M283-D09 | |
| (SEQ ID NO: 70) | |
| QDIQMTQSPA TLSLSPGERA TLSCRASQNV HTYLAWYQQK PGQAPRLLIS EASNRATGVP | 60 |
| ARFTGSGSGT DFTLSISSLE PEDFAIYYCQ QRGGWPITFG GGTKVEIK | 108 |
| HC for Fab M283-D09 | |
| (SEQ ID NO: 71) | |
| EVQLLESGGG LVQPGGSLRL SCAASGFTFS QYPMWWVRQA PGKGLEWVSY IVPSGGRTYY | 60 |
| ADSVKGRFTI SRDNSKNTLY LQMNSLRAED TAVYYCAKDR AYGDYVGWNG FDYWGQGTLV | 120 |
| TVSS | 124 |
| LC for Fab M284-B05 | |
| (SEQ ID NO: 72) | |
| QDIQMTQSPA TLSLSPGERA TLSCRASQSI GNHLAWYQQK SGQAPRLLIY DASNRATGIP | 60 |
| ARFSGGGSGT DFTLTISSLE PEDFAVYFCQ QRGNWPITFG QGTRLEIK | 108 |
| HC for Fab M284-B05 | |
| (SEQ ID NO: 73) | |
| EVQLLESGGG LVQPGGSLRL SCAASGFTFS QYPMWWVRQA PGKGLEWVSY IVPSGGRTYY | 60 |
| ADSVKGRFTI SRDNSKNTLY LQMNSLRAED TAVYYCAKDR AYGDYVGWNG FDYWGQGTLV | 120 |
| TVSS | 124 |
| LC for Fab M293-E07 | |
| (SEQ ID NO: 74) | |
| QDIQMTQSPA TLSLSPGERA TLSCRASQSI SSFLAWYQQK PGQAPRLLIY DASYRATGIP | 60 |
| ARFSGSGSGT DFTLTISSLE PEDYAVYYCQ QRGNWPITFG QGTKVEIK | 108 |
| HC for Fab M293-E07 | |
| (SEQ ID NO: 75) | |
| EVQLLESGGG LVQPGGSLRL SCAASGFTFS QYPMWWVRQA PGKGLEWVSY IVPSGGRTYY | 60 |
| ADSVKGRFTI SRDNSKNTLY LQMNSLRAED TAVYYCAKDR AYGDYVGWNG FDYWGQGTLV | 120 |
| TVSS | 124 |
| LC for Fab M295-G02 | |
| (SEQ ID NO: 76) | |
| QDIQMTQSPA TLSLSPGERA TLSCRASQSI SSFLAWYQQK PGQAPRLLIY GASSRARGTP | 60 |
| DRFSGSGSGT DFTLTISSLE PEDYAVYYCQ QRGNWPITFG QGTRLEIK | 108 |
| HC for Fab M295-G02 | |
| (SEQ ID NO: 77) | |
| EVQLLESGGG LVQPGGSLRL SCAASGFTFS QYPMWWVRQA PGKGLEWVSY IVPSGGRTYY | 60 |
| ADSVKGRFTI SRDNSKNTLY LQMNSLRAED TAVYYCAKDR AYGDYVGWNG FDYWGQGTLV | 120 |
| TVSS | 124 |
| LC for Fab M293-D07 | |
| (SEQ ID NO: 78) | |
| QDIQMTQSPA TLSLSPGERA TLSCRASQSI SSFLAWYQQK PGQAPRLLIY GASTRATGIP | 60 |
| ARFSGSGSGT DFTLTISSLE PEDYAVYYCQ QRGNWPITFG QGTRLEIK | 108 |
| HC for Fab M293-D07 | |
| (SEQ ID NO: 79) | |
| EVQLLESGGG LVQPGGSLRL SCAASGFTFS QYPMWWVRQA PGKGLEWVSY IVPSGGRTYY | 60 |
| ADSVKGRFTI SRDNSKNTLY LQMNSLRAED TAVYYCAKDR AYGDYVGWNG FDYWGQGTLV | 120 |
| TVSS | 124 |
| LC for Fab M278-B08 | |
| (SEQ ID NO: 80) | |
| QDIQMTQSPA TLSLSPGERA TLSCRASQSI SSHLAWYQQK PGQAPRLVIS GASSRATGIP | 60 |
| DRFSGSGSGT DFTLTISRLE PEDYAVYYCQ QRGNWPITFG QGTRLEIK | 108 |
| HC for Fab M278-B08 | |
| (SEQ ID NO: 81) | |
| EVQLLESGGG LVQPGGSLRL SCAASGFTFS QYPMWWVRQA PGKGLEWVSY IVPSGGRTYY | 60 |
| ADSVKGRFTI SRDNSKNTLY LQMNSLRAED TAVYYCAKDR AYGDYVGWNG FDYWGQGTLV | 120 |
| TVSS | 124 |
| LC for Fab M283-D02 | |
| (SEQ ID NO: 82) | |
| QDIQMTQSPA TLSLSPGERA TLSCRASQSI STSLAWYQQK PGQAPRLLIY DASNRAAVIP | 60 |
| ARFSGSGSGT DFTLTISNLE PEDSAVYYCQ QRGAWPLTFG GGTKVEIK | 108 |
| HC for Fab M283-D02 | |
| (SEQ ID NO: 83) | |
| EVQLLESGGG LVQPGGSLRL SCAASGFTFS QYPMWWVRQA PGKGLEWVSY IVPSGGRTYY | 60 |
| ADSVKGRFTI SRDNSKNTLY LQMNSLRAED TAVYYCAKDR AYGDYVGWNG FDYWGQGTLV | 120 |
| TVSS | 124 |
| LC for Fab M281-A02 | |
| (SEQ ID NO: 84) | |
| QDIQMTQSPA TLSLSPGERA TLSCRASQSL GRSDLAWYQQ KPGQAPRLLI FGVSNRVTGT | 60 |
| PDRFSGSGSG TDFSLTISSL EPEDFAVYYC QQRSNWPPTF GGGTKLEIK | 109 |
| HC for Fab M281-A02 | |
| (SEQ ID NO: 85) | |
| EVQLLESGGG LVQPGGSLRL SCAASGFTFS QYPMWWVRQA PGKGLEWVSY IVPSGGRTYY | 60 |
| ADSVKGRFTI SRDNSKNTLY LQMNSLRAED TAVYYCAKDR AYGDYVGWNG FDYWGQGTLV | 120 |
| TVSS | 124 |
| LC for Fab M280-H04 | |
| (SEQ ID NO: 86) | |
| QDIQMTQSPA TLSLSPGERA TLSCRASQSL GRSDLAWYQQ KPGQAPRLLI FGVSNRVTGT | 60 |
| PDRFSGSGSG TDFTLTIGSL EPEDFAVYYC QQRSTWPITF GQGTRLEIK | 109 |
| HC for Fab M280-H04 | |
| (SEQ ID NO: 87) | |
| EVQLLESGGG LVQPGGSLRL SCAASGFTFS QYPMWWVRQA PGKGLEWVSY IVPSGGRTYY | 60 |
| ADSVKGRFTI SRDNSKNTLY LQMNSLRAED TAVYYCAKDR AYGDYVGWNG FDYWGQGTLV | 120 |
| TVSS | 124 |
| LC for Fab M285-D05 | |
| (SEQ ID NO: 88) | |
| QDIQMTQSPA TLSLSPGERA TLSCRASQSL GSFLAWYQQK PGQAPRLLIY GASYRATGIP | 60 |
| ARFSGSGSGT DFTLTISSLE PEDYAVYYCQ QRGNWPITFG QGTRLEIK | 108 |
| HC for Fab M285-D05 | |
| (SEQ ID NO: 89) | |
| EVQLLESGGG LVQPGGSLRL SCAASGFTFS QYPMWWVRQA PGKGLEWVSY IVPSGGRTYY | 60 |
| ADSVKGRFTI SRDNSKNTLY LQMNSLRAED TAVYYCAKDR AYGDYVGWNG FDYWGQGTLV | 120 |
| TVSS | 124 |
| LC for Fab M285-C03 | |
| (SEQ ID NO: 90) | |
| QDIQMTQSPA TLSLSPGERA TLSCRASQSV DSYLAWYQQK PGQAPRLLIY DASNRATGIP | 60 |
| ARFSGSGSGT DFTLTISNLE PEDFAVYYCQ HRRSWPLTFG GGTKVEIK | 108 |
| HC for Fab M285-C03 | |
| (SEQ ID NO: 91) | |
| EVQLLESGGG LVQPGGSLRL SCAASGFTFS QYPMWWVRQA PGKGLEWVSY IVPSGGRTYY | 60 |
| ADSVKGRFTI SRDNSKNTLY LQMNSLRAED TAVYYCAKDR AYGDYVGWNG FDYWGQGTLV | 120 |
| TVSS | 124 |
| LC for Fab M284-A01 | |
| (SEQ ID NO: 92) | |
| QDIQMTQSPA TLSLSPGERA TLSCRASQSV DSYLAWYQQK PGQAPRLLIY GASNRATGIP | 60 |
| ARFSGSGSGT DFTLTIASLE PEDFAVYYCQ QRRKWPVTFG GGTKVEIK | 108 |
| HC for Fab M284-A01 | |
| (SEQ ID NO: 93) | |
| EVQLLESGGG LVQPGGSLRL SCAASGFTFS QYPMWWVRQA PGKGLEWVSY IVPSGGRTYY | 60 |
| ADSVKGRFTI SRDNSKNTLY LQMNSLRAED TAVYYCAKDR AYGDYVGWNG FDYWGQGTLV | 120 |
| TVSS | 124 |
| LC for Fab M279-F11 | |
| (SEQ ID NO: 94) | |
| QDIQMTQSPA TLSLSPGERA TLSCRASQSV GGDIAWYQQK PGQAPRLLMY GASNRATGIP | 60 |
| ARFSGSGSGT DFTLTISSLE PEDFAVYYCQ QRSYWPVTFG GGTRVEIK | 108 |
| HC for Fab M279-F11 | |
| (SEQ ID NO: 95) | |
| EVQLLESGGG LVQPGGSLRL SCAASGFTFS QYPMWWVRQA PGKGLEWVSY IVPSGGRTYY | 60 |
| ADSVKGRFTI SRDNSKNTLY LQMNSLRAED TAVYYCAKDR AYGDYVGWNG FDYWGQGTLV | 120 |
| TVSS | 124 |
| LC for Fab M279-B09 | |
| (SEQ ID NO: 96) | |
| QDIQMTQSPA TLSLSPGERA TLSCRASQSV GRDLAWYQQK PGQAPRLLIY GATTRATGIP | 60 |
| ARFSGSGSGT DFTLTISSLE PEDFAVYFCQ QRGNWPITFG QGTRLEIK | 108 |
| HC for Fab M279-B09 | |
| (SEQ ID NO: 97) | |
| EVQLLESGGG LVQPGGSLRL SCAASGFTFS QYPMWWVRQA PGKGLEWVSY IVPSGGRTYY | 60 |
| ADSVKGRFTI SRDNSKNTLY LQMNSLRAED TAVYYCAKDR AYGDYVGWNG FDYWGQGTLV | 120 |
| TVSS | 124 |
| LC for Fab M281-F02 | |
| (SEQ ID NO: 98) | |
| QDIQMTQSPA TLSLSPGERA TLSCRASQSV GSDLAWYQQK HGQAPRLLMY GASTRATGIP | 60 |
| ARFSGSGSGT DFTLTISSLE PEDFAVYFCQ QRGNWPITFG QGTRLEIK | 108 |
| HC for Fab M281-F02 | |
| (SEQ ID NO: 99) | |
| EVQLLESGGG LVQPGGSLRL SCAASGFTFS QYPMWWVRQA PGKGLEWVSY IVPSGGRTYY | 60 |
| ADSVKGRFTI SRDNSKNTLY LQMNSLRAED TAVYYCAKDR AYGDYVGWNG FDYWGQGTLV | 120 |
| TVSS | 124 |
| LC for Fab M297-F05 | |
| (SEQ ID NO: 100) | |
| QDIQMTQSPA TLSLSPGERA TLSCRASQSV GSFLAWYQQK PGQAPRLLIY GASNRATGIP | 60 |
| PRFSGSGSGT DFTLTISSLE PEDSAAYYCQ QRGNWPITFG QGTRLEIK | 108 |
| HC for Fab M297-F05 | |
| (SEQ ID NO: 101) | |
| EVQLLESGGG LVQPGGSLRL SCAASGFTFS QYPMWWVRQA PGKGLEWVSY IVPSGGRTYY | 60 |
| ADSVKGRFTI SRDNSKNTLY LQMNSLRAED TAVYYCAKDR AYGDYVGWNG FDYWGQGTLV | 120 |
| TVSS | 124 |
| LC for Fab M285-C08 | |
| (SEQ ID NO: 102) | |
| QDIQMTQSPA TLSLSPGERA TLSCRASQSV GSQLAWYQQK PGQAPRLLIY DASYRATGIP | 60 |
| VRFSGSGSGT DFTLTISSLE PEDYAVYYCQ QRGNWPITFG QGTRLEIK | 108 |
| HC for Fab M285-C08 | |
| (SEQ ID NO: 103) | |
| EVQLLESGGG LVQPGGSLRL SCAASGFTFS QYPMWWVRQA PGKGLEWVSY IVPSGGRTYY | 60 |
| ADSVKGRFTI SRDNSKNTLY LQMNSLRAED TAVYYCAKDR AYGDYVGWNG FDYWGQGTLV | 120 |
| TVSS | 124 |
| LC for Fab M292-H03 | |
| (SEQ ID NO: 104) | |
| QDIQMTQSPA TLSLSPGERA TLSCRASQSV GTHLAWYQQK PGQAPRLLIY GASTRATGIP | 60 |
| ARFSGSGSGT EFTLTISSLQ SEDFAIYHCQ QRRSWPITFG QGTRLEIK | 108 |
| HC for Fab M292-H03 | |
| (SEQ ID NO: 105) | |
| EVQLLESGGG LVQPGGSLRL SCAASGFTFS QYPMWWVRQA PGKGLEWVSY IVPSGGRTYY | 60 |
| ADSVKGRFTI SRDNSKNTLY LQMNSLRAED TAVYYCAKDR AYGDYVGWNG FDYWGQGTLV | 120 |
| TVSS | 124 |
| LC for Fab M288-E08 | |
| (SEQ ID NO: 106) | |
| QDIQMTQSPA TLSLSPGERA TLSCRASQSV NHFLAWYQQK PGQAPRLLIY GASNRATGVP | 60 |
| ARFNGTGSGT DFTLTISSLE PEDFAVYYCQ QRGSWPITFG QGTRLEIK | 108 |
| HC for Fab M288-E08 | |
| (SEQ ID NO: 107) | |
| EVQLLESGGG LVQPGGSLRL SCAASGFTFS QYPMWWVRQA PGKGLEWVSY IVPSGGRTYY | 60 |
| ADSVKGRFTI SRDNSKNTLY LQMNSLRAED TAVYYCAKDR AYGDYVGWNG FDYWGQGTLV | 120 |
| TVSS | 124 |
| LC for Fab M283-H10 | |
| (SEQ ID NO: 108) | |
| QDIQMTQSPA TLSLSPGERA TLSCRASQSV NSFLAWYQQK AGQAPRLLIY DASNRATGIP | 60 |
| ARFSGSGSGT DFTLTISSLE PEDFAVYYCQ QRSNWPITFG QGTRLEIR | 108 |
| HC for Fab M283-H10 | |
| (SEQ ID NO: 109) | |
| EVQLLESGGG LVQPGGSLRL SCAASGFTFS QYPMWWVRQA PGKGLEWVSY IVPSGGRTYY | 60 |
| ADSVKGRFTI SRDNSKNTLY LQMNSLRAED TAVYYCAKDR AYGDYVGWNG FDYWGQGTLV | 120 |
| TVSS | 124 |
| LC for Fab M280-G06 | |
| (SEQ ID NO: 110) | |
| QDIQMTQSPA TLSLSPGERA TLSCRASQSV NSYLAWYQQK PGQAPRLLIY DASNRATGIP | 60 |
| ARFSGSGSGT DFTLTISSLE PEDFAVYYCQ QRGYWPPSFG GGTKVEIL | 108 |
| HC for Fab M280-G06 | |
| (SEQ ID NO: 111) | |
| EVQLLESGGG LVQPGGSLRL SCAASGFTFS QYPMWWVRQA PGKGLEWVSY IVPSGGRTYY | 60 |
| ADSVKGRFTI SRDNSKNTLY LQMNSLRAED TAVYYCAKDR AYGDYVGWNG FDYWGQGTLV | 120 |
| TVSS | 124 |
| LC for Fab M293-E02 | |
| (SEQ ID NO: 112) | |
| QDIQMTQSPA TLSLSPGERA TLSCRASQSV SNFLAWYQQK PGQAPRLLIY GASSRATGIP | 60 |
| DRFSGSGSGT DFTLTISSLE PEDFAVYYCQ QRGNWPITFG QGTRLEIK | 108 |
| HC for Fab M293-E02 | |
| (SEQ ID NO: 113) | |
| EVQLLESGGG LVQPGGSLRL SCAASGFTFS QYPMWWVRQA PGKGLEWVSY IVPSGGRTYY | 60 |
| ADSVKGRFTI SRDNSKNTLY LQMNSLRAED TAVYYCAKDR AYGDYVGWNG FDYWGQGTLV | 120 |
| TVSS | 124 |
| LC for Fab M296-D03 | |
| (SEQ ID NO: 114) | |
| QDIQMTQSPA TLSLSPGERA TLSCRASQSV SNYLAWYQQK RGQAPRLLIY GASTRATGIP | 60 |
| ARFSGSGSGT EFTLTISSLQ SEDFAVYYCQ QRGNWPITFG QGTRLEIK | 108 |
| HC for Fab M296-D03 | |
| (SEQ ID NO: 115) | |
| EVQLLESGGG LVQPGGSLRL SCAASGFTFS QYPMWWVRQA PGKGLEWVSY IVPSGGRTYY | 60 |
| ADSVKGRFTI SRDNSKNTLY LQMNSLRAED TAVYYCAKDR AYGDYVGWNG FDYWGQGTLV | 120 |
| TVSS | 124 |
| LC for Fab M296-E02 | |
| (SEQ ID NO: 116) | |
| QDIQMTQSPA TLSLSPGERA TLSCRASQSV SRYLAWYQQK PGQAPRLLIY DASSRATGVP | 60 |
| ARFSGGGSGT DFTLTISSLE PEDFAVYYCH QRSSWPITFG QGTRLEIK | 108 |
| HC for Fab M296-E02 | |
| (SEQ ID NO: 117) | |
| EVQLLESGGG LVQPGGSLRL SCAASGFTFS QYPMWWVRQA PGKGLEWVSY IVPSGGRTYY | 60 |
| ADSVKGRFTI SRDNSKNTLY LQMNSLRAED TAVYYCAKDR AYGDYVGWNG FDYWGQGTLV | 120 |
| TVSS | 124 |
| LC for Fab M281-H07 | |
| (SEQ ID NO: 118) | |
| QDIQMTQSPA TLSLSPGERA TLSCRASQSV SRYLAWYQQR PGQAPRLLIY DASNRATGIP | 60 |
| ARFSGSGSGT DFTLTISSLE PEDFAVYYCQ QRINWPLTFG GGTKVEIK | 108 |
| HC for Fab M281-H07 | |
| (SEQ ID NO: 119) | |
| EVQLLESGGG LVQPGGSLRL SCAASGFTFS QYPMWWVRQA PGKGLEWVSY IVPSGGRTYY | 60 |
| ADSVKGRFTI SRDNSKNTLY LQMNSLRAED TAVYYCAKDR AYGDYVGWNG FDYWGQGTLV | 120 |
| TVSS | 124 |
| LC for Fab M283-C02 | |
| (SEQ ID NO: 120) | |
| QDIQMTQSPA TLSLSPGERA TLSCRASQSV SSFLAWYQQK PGQAPRLLIY HASNRATGIP | 60 |
| ARFRGSGSGT DFTLTISSLE PEDFAVYYCQ QRGNWPITFG QGTRLEIK | 108 |
| HC for Fab M283-C02 | |
| (SEQ ID NO: 121) | |
| EVQLLESGGG LVQPGGSLRL SCAASGFTFS QYPMWWVRQA PGKGLEWVSY IVPSGGRTYY | 60 |
| ADSVKGRFTI SRDNSKNTLY LQMNSLRAED TAVYYCAKDR AYGDYVGWNG FDYWGQGTLV | 120 |
| TVSS | 124 |
| LC for Fab M282-E10 | |
| (SEQ ID NO: 122) | |
| QDIQMTQSPA TLSLSPGERA TLSCRASQSV SSFLAWYQQK PGRAPRLVIY DASNRASGIP | 60 |
| ARFSGSGSGA DFTLTITSLE PEDFAVYYCQ QRANWPLTFG GGTRVEIK | 108 |
| HC for Fab M282-E10 | |
| (SEQ ID NO: 123) | |
| EVQLLESGGG LVQPGGSLRL SCAASGFTFS QYPMWWVRQA PGKGLEWVSY IVPSGGRTYY | 60 |
| ADSVKGRFTI SRDNSKNTLY LQMNSLRAED TAVYYCAKDR AYGDYVGWNG FDYWGQGTLV | 120 |
| TVSS | 124 |
| LC for Fab M293-E12 | |
| (SEQ ID NO: 124) | |
| QDIQMTQSPA TLSLSPGERA TLSCRASQSV SSHLAWYQQK PGQAPRLLIY GASSRATGIP | 60 |
| DRFSGSGSGT DFTLTISRLE PEDFAVYYCQ QRGNWPITFG QGTRLEIK | 108 |
| HC for Fab M293-E12 | |
| (SEQ ID NO: 125) | |
| EVQLLESGGG LVQPGGSLRL SCAASGFTFS QYPMWWVRQA PGKGLEWVSY IVPSGGRTYY | 60 |
| ADSVKGRFTI SRDNSKNTLY LQMNSLRAED TAVYYCAKDR AYGDYVGWNG FDYWGQGTLV | 120 |
| TVSS | 124 |
| LC for Fab M278-G02 | |
| (SEQ ID NO: 126) | |
| QDIQMTQSPA TLSLSPGERA TLSCRASQSV SSYLAWYKQK PGQAPRLLIY DASNRATGIP | 60 |
| ARFSGSGSGT DFTLTISSLE PEDFAVYFCQ QRGNWPITFG QGTRLEIK | 108 |
| HC for Fab M278-G02 | |
| (SEQ ID NO: 127) | |
| EVQLLESGGG LVQPGGSLRL SCAASGFTFS QYPMWWVRQA PGKGLEWVSY IVPSGGRTYY | 60 |
| ADSVKGRFTI SRDNSKNTLY LQMNSLRAED TAVYYCAKDR AYGDYVGWNG FDYWGQGTLV | 120 |
| TVSS | 124 |
| LC for Fab M284-D11 | |
| (SEQ ID NO: 128) | |
| QDIQMTQSPA TLSLSPGERA TLSCRASQSV SSYLAWYKQK PGQAPRLLIY GASNRATGIP | 60 |
| ARFSGSGSGT DFTLTISSLE PEDFAVYFCQ QRGNWPITFG QGTRLEIK | 108 |
| HC for Fab M284-D11 | |
| (SEQ ID NO: 129) | |
| EVQLLESGGG LVQPGGSLRL SCAASGFTFS QYPMWWVRQA PGKGLEWVSY IVPSGGRTYY | 60 |
| ADSVKGRFTI SRDNSKNTLY LQMNSLRAED TAVYYCAKDR AYGDYVGWNG FDYWGQGTLV | 120 |
| TVSS | 124 |
| LC for Fab M278-B03 | |
| (SEQ ID NO: 130) | |
| QDIQMTQSPA TLSLSPGERA TLSCRASQSV SSYLAWYQQK PGHAPRLLIY GASHRATGIA | 60 |
| DRFSGSGSGT DFTLTISSLE PEDFAVYYCQ QRSNWPITFG QGTRLEIK | 108 |
| HC for Fab M278-B03 | |
| (SEQ ID NO: 131) | |
| EVQLLESGGG LVQPGGSLRL SCAASGFTFS QYPMWWVRQA PGKGLEWVSY IVPSGGRTYY | 60 |
| ADSVKGRFTI SRDNSKNTLY LQMNSLRAED TAVYYCAKDR AYGDYVGWNG FDYWGQGTLV | 120 |
| TVSS | 124 |
| LC for Fab M280-C06 | |
| (SEQ ID NO: 132) | |
| QDIQMTQSPA TLSLSPGERA TLSCRASQSV SSYLAWYQQK PGQAPRLLIY DASNRATGIP | 60 |
| ARFRGSGSGT DFTLTISSLE PEDFAVYYCQ QRGNWPITFG QGTRLEIK | 108 |
| HC for Fab M280-C06 | |
| (SEQ ID NO: 133) | |
| EVQLLESGGG LVQPGGSLRL SCAASGFTFS QYPMWWVRQA PGKGLEWVSY IVPSGGRTYY | 60 |
| ADSVKGRFTI SRDNSKNTLY LQMNSLRAED TAVYYCAKDR AYGDYVGWNG FDYWGQGTLV | 120 |
| TVSS | 124 |
| LC for Fab M283-G06 | |
| (SEQ ID NO: 134) | |
| QDIQMTQSPA TLSLSPGERA TLSCRASQSV SSYLAWYQQK PGQAPRLLIY DASNRATGIP | 60 |
| ARFSGSGSGT DFTLTISSLE PADFAVYYCQ QRSNWPTTFG QGTRLEIK | 108 |
| HC for Fab M283-G06 | |
| (SEQ ID NO: 135) | |
| EVQLLESGGG LVQPGGSLRL SCAASGFTFS QYPMWWVRQA PGKGLEWVSY IVPSGGRTYY | 60 |
| ADSVKGRFTI SRDNSKNTLY LQMNSLRAED TAVYYCAKDR AYGDYVGWNG FDYWGQGTLV | 120 |
| TVSS | 124 |
| LC for Fab M279-D12 | |
| (SEQ ID NO: 136) | |
| QDIQMTQSPA TLSLSPGERA TLSCRASQSV SSYLAWYQQK PGQAPRLLIY DASNRATGIP | 60 |
| ARFSGSGSGT DFTLTISSLE PEDFAVYYCQ QRGNWPITFG QGTRLEIK | 108 |
| HC for Fab M279-D12 | |
| (SEQ ID NO: 137) | |
| EVQLLESGGG LVQPGGSLRL SCAASGFTFS QYPMWWVRQA PGKGLEWVSY IVPSGGRTYY | 60 |
| ADSVKGRFTI SRDNSKNTLY LQMNSLRAED TAVYYCAKDR AYGDYVGWNG FDYWGQGTLV | 120 |
| TVSS | 124 |
| LC for Fab M279-A02 | |
| (SEQ ID NO: 138) | |
| QDIQMTQSPA TLSLSPGERA TLSCRASQSV SSYLAWYQQK PGQAPRLLIY GASNRATGIP | 60 |
| ARFSGSGSGT DFTLTISSLE PEDFVVYFCQ QRSNWPITFG QGTRLEIK | 108 |
| HC for Fab M279-A02 | |
| (SEQ ID NO: 139) | |
| EVQLLESGGG LVQPGGSLRL SCAASGFTFS QYPMWWVRQA PGKGLEWVSY IVPSGGRTYY | 60 |
| ADSVKGRFTI SRDNSKNTLY LQMNSLRAED TAVYYCAKDR AYGDYVGWNG FDYWGQGTLV | 120 |
| TVSS | 124 |
| LC for Fab M287-F03 | |
| (SEQ ID NO: 140) | |
| QDIQMTQSPA TLSLSPGERA TLSCRASQSV SSYLAWYQQK PGQAPRLLIY GASSRATGIP | 60 |
| DRFSGSGSGT DFTLTISSLE PEDFAVYYCQ QRSNWPVTFG PGTTVDIK | 108 |
| HC for Fab M287-F03 | |
| (SEQ ID NO: 141) | |
| EVQLLESGGG LVQPGGSLRL SCAASGFTFS QYPMWWVRQA PGKGLEWVSY IVPSGGRTYY | 60 |
| ADSVKGRFTI SRDNSKNTLY LQMNSLRAED TAVYYCAKDR AYGDYVGWNG FDYWGQGTLV | 120 |
| TVSS | 124 |
| LC for Fab M284-F02 | |
| (SEQ ID NO: 142) | |
| QDIQMTQSPA TLSLSPGERA TLSCRASQSV SSYLAWYQQK PGQAPRLLIY GASTRATGIP | 60 |
| ARFSGSGSGT DFTLTISSLE PEDFAVYYCQ QRGNWPITFG QGTRLEIK | 108 |
| HC for Fab M284-F02 | |
| (SEQ ID NO: 143) | |
| EVQLLESGGG LVQPGGSLRL SCAASGFTFS QYPMWWVRQA PGKGLEWVSY IVPSGGRTYY | 60 |
| ADSVKGRFTI SRDNSKNTLY LQMNSLRAED TAVYYCAKDR AYGDYVGWNG FDYWGQGTLV | 120 |
| TVSS | 124 |
| LC for Fab M282-H04 | |
| (SEQ ID NO: 144) | |
| QDIQMTQSPA TLSLSPGERA TLSCRASQSV SSYLAWYQQK PGQAPRLLVF GASNRATGIS | 60 |
| DRFSGSGSGT DFTLTISRLE PEDFATYYCQ QRGNWPPTFG GGTKVEIR | 108 |
| HC for Fab M282-H04 | |
| (SEQ ID NO: 145) | |
| EVQLLESGGG LVQPGGSLRL SCAASGFTFS QYPMWWVRQA PGKGLEWVSY IVPSGGRTYY | 60 |
| ADSVKGRFTI SRDNSKNTLY LQMNSLRAED TAVYYCAKDR AYGDYVGWNG FDYWGQGTLV | 120 |
| TVSS | 124 |
| LC for Fab M278-A08 | |
| (SEQ ID NO: 146) | |
| QDIQMTQSPA TLSLSPGERA TLSCRASQSV SSYLAWYQQR LGQSPRLLIY GASNRATGIP | 60 |
| DRFSGSGSGT DFTLTISSLE PEDFAVYYCE QRRSWPLTFG GGTKVEIK | 108 |
| HC for Fab M278-A08 | |
| (SEQ ID NO: 147) | |
| EVQLLESGGG LVQPGGSLRL SCAASGFTFS QYPMWWVRQA PGKGLEWVSY IVPSGGRTYY | 60 |
| ADSVKGRFTI SRDNSKNTLY LQMNSLRAED TAVYYCAKDR AYGDYVGWNG FDYWGQGTLV | 120 |
| TVSS | 124 |
| LC for Fab M293-C05 | |
| (SEQ ID NO: 148) | |
| QDIQMTQSPA TLSLSPGERA TLSCRASRSV GTHLAWYQQK PGQPPRLLIY DASVRAAGVP | 60 |
| ARFSGSGSGT DFTLSISSLE SDDFAVYYCQ QRGGWPITFG GGTKVEIK | 108 |
| HC for Fab M293-C05 | |
| (SEQ ID NO: 149) | |
| EVQLLESGGG LVQPGGSLRL SCAASGFTFS QYPMWWVRQA PGKGLEWVSY IVPSGGRTYY | 60 |
| ADSVKGRFTI SRDNSKNTLY LQMNSLRAED TAVYYCAKDR AYGDYVGWNG FDYWGQGTLV | 120 |
| TVSS | 124 |
| LC for Fab M280-E08 | |
| (SEQ ID NO: 150) | |
| QDIQMTQSPA TLSLSPGERA TLSCRASRSV GTHLAWYQQK PGQPPRLLIY DASVRAAGVP | 60 |
| ARFSGSGSGT DFTLTISSLE PEDFAVYFCQ QRGNWPITFG QGTRLEIK | 108 |
| HC for Fab M280-E08 | |
| (SEQ ID NO: 151) | |
| EVQLLESGGG LVQPGGSLRL SCAASGFTFS QYPMWWVRQA PGKGLEWVSY IVPSGGRTYY | 60 |
| ADSVKGRFTI SRDNSKNTLY LQMNSLRAED TAVYYCAKDR AYGDYVGWNG FDYWGQGTLV | 120 |
| TVSS | 124 |
| LC for Fab M287-B07 | |
| (SEQ ID NO: 152) | |
| QDIQMTQSPA TLSLSPGERA TLSCRTSQSV SRYLAWYQQK PGQAPRLLIY GTSNRATGIP | 60 |
| ARFSGSGSGT DFTLTIDSLE PEDFAIYYCQ QRYNWPITFG QGTRLEIK | 108 |
| HC for Fab M287-B07 | |
| (SEQ ID NO: 153) | |
| EVQLLESGGG LVQPGGSLRL SCAASGFTFS QYPMWWVRQA PGKGLEWVSY IVPSGGRTYY | 60 |
| ADSVKGRFTI SRDNSKNTLY LQMNSLRAED TAVYYCAKDR AYGDYVGWNG FDYWGQGTLV | 120 |
| TVSS | 124 |
| LC for Fab M280-H10 | |
| (SEQ ID NO: 154) | |
| QDIQMTQSPA TLSLSPGERA TLSCRTSQSV SRYLAWYQQK PGQAPRLLIY GTSNRATGIP | 60 |
| ARFSGSGSGT DFTLTISSLE PEDFAVYYCQ QRYNWPITFG QGTRLEIK | 108 |
| HC for Fab M280-H10 | |
| (SEQ ID NO: 155) | |
| EVQLLESGGG LVQPGGSLRL SCAASGFTFS QYPMWWVRQA PGKGLEWVSY IVPSGGRTYY | 60 |
| ADSVKGRFTI SRDNSKNTLY LQMNSLRAED TAVYYCAKDR AYGDYVGWNG FDYWGQGTLV | 120 |
| TVSS | 124 |
| LC for Fab M286-E07 | |
| (SEQ ID NO: 156) | |
| QDIQMTQSPA TLSLSPGERA TLTCRASQSL SRSDLAWYQQ RPGQAPRLLI FGASNRATDT | 60 |
| PDRFSGSGSG TDFTLTITRL EPEDFAVYYC QQRSNWPPTF GQGTKLEIK | 109 |
| HC for Fab M286-E07 | |
| (SEQ ID NO: 157) | |
| EVQLLESGGG LVQPGGSLRL SCAASGFTFS QYPMWWVRQA PGKGLEWVSY IVPSGGRTYY | 60 |
| ADSVKGRFTI SRDNSKNTLY LQMNSLRAED TAVYYCAKDR AYGDYVGWNG FDYWGQGTLV | 120 |
| TVSS | 124 |
| LC for Fab M280-E12 | |
| (SEQ ID NO: 158) | |
| QDIQMTQSPA TLSLSPGESA TLSCRASQSV SSYLAWYQQK PGQAPRLLIY GASNRATGIP | 60 |
| ARFSGSGSGT DFTLTISSLE PEDFVVYFCQ QRSNWPITFG QGTRLEIK | 108 |
| HC for Fab M280-E12 | |
| (SEQ ID NO: 159) | |
| EVQLLESGGG LVQPGGSLRL SCAASGFTFS QYPMWWVRQA PGKGLEWVSY IVPSGGRTYY | 60 |
| ADSVKGRFTI SRDNSKNTLY LQMNSLRAED TAVYYCAKDR AYGDYVGWNG FDYWGQGTLV | 120 |
| TVSS | 124 |
| LC for Fab M281-A05 | |
| (SEQ ID NO: 160) | |
| QDIQMTQSPA TLSLSPGETA ILSCRASQSV GRFLAWYQQK PGQAPRLLIY GASSRATGIP | 60 |
| DRFSGSGSGT EFTLTISSLQ SEDFAVYYCQ QRGNWPITFG QGTRLEIK | 108 |
| HC for Fab M281-A05 | |
| (SEQ ID NO: 161) | |
| EVQLLESGGG LVQPGGSLRL SCAASGFTFS QYPMWWVRQA PGKGLEWVSY IVPSGGRTYY | 60 |
| ADSVKGRFTI SRDNSKNTLY LQMNSLRAED TAVYYCAKDR AYGDYVGWNG FDYWGQGTLV | 120 |
| TVSS | 124 |
| LC for Fab M283-C11 | |
| (SEQ ID NO: 162) | |
| QDIQMTQSPA TLSLSPGETA TLSCRASQPV GSYLAWYQQK PGQAPRLLIY GASNRATGIP | 60 |
| ARFSGSGSGT DFTLTISSLE PEDFAVYYCQ QRGNWPLTFG GGTKVEIK | 108 |
| HC for Fab M283-C11 | |
| (SEQ ID NO: 163) | |
| EVQLLESGGG LVQPGGSLRL SCAASGFTFS QYPMWWVRQA PGKGLEWVSY IVPSGGRTYY | 60 |
| ADSVKGRFTI SRDNSKNTLY LQMNSLRAED TAVYYCAKDR AYGDYVGWNG FDYWGQGTLV | 120 |
| TVSS | 124 |
| LC for Fab M279-F07 | |
| (SEQ ID NO: 164) | |
| QDIQMTQSPA TLSLSPGETA TLSCRASQSV GYYLAWYQQR PGQAPRLLIF GASRRATGIP | 60 |
| DRFSGSGSGT DFTLTISRLE PEDFAVYYCQ QRSNWPITFG QGTRLEIK | 108 |
| HC for Fab M279-F07 | |
| (SEQ ID NO: 165) | |
| EVQLLESGGG LVQPGGSLRL SCAASGFTFS QYPMWWVRQA PGKGLEWVSY IVPSGGRTYY | 60 |
| ADSVKGRFTI SRDNSKNTLY LQMNSLRAED TAVYYCAKDR AYGDYVGWNG FDYWGQGTLV | 120 |
| TVSS | 124 |
| LC for Fab M284-H03 | |
| (SEQ ID NO: 166) | |
| QDIQMTQSPA TLSVSPGDRA TLSCRTSQRV DSNLAWYQQK PGQPPRLLIY GASTRATGVP | 60 |
| TRFRGSGSGT DFTLTITSLE PEDFAVYYCQ QRRKWPVTFG GGTKVEIK | 108 |
| HC for Fab M284-H03 | |
| (SEQ ID NO: 167) | |
| EVQLLESGGG LVQPGGSLRL SCAASGFTFS QYPMWWVRQA PGKGLEWVSY IVPSGGRTYY | 60 |
| ADSVKGRFTI SRDNSKNTLY LQMNSLRAED TAVYYCAKDR AYGDYVGWNG FDYWGQGTLV | 120 |
| TVSS | 124 |
| LC for Fab M295-G08 | |
| (SEQ ID NO: 168) | |
| QDIQMTQSPA TLSVSPGDTA TLSCRASQSV GSDLAWYQQK PGQAPRLLIY GASSRATGIP | 60 |
| DRFSGSGSGT DFTLTISRLE PEDFAVYYCQ QRGNWPITFG QGTRLEIK | 108 |
| HC for Fab M295-G08 | |
| (SEQ ID NO: 169) | |
| EVQLLESGGG LVQPGGSLRL SCAASGFTFS QYPMWWVRQA PGKGLEWVSY IVPSGGRTYY | 60 |
| ADSVKGRFTI SRDNSKNTLY LQMNSLRAED TAVYYCAKDR AYGDYVGWNG FDYWGQGTLV | 120 |
| TVSS | 124 |
| LC for Fab M287-E01 | |
| (SEQ ID NO: 170) | |
| QDIQMTQSPA TLSVSPGEIA TLSCRASQNI GSNLAWYQQK PGQAPRLLIY GASTRAPGIP | 60 |
| ARFSGSGSGT EFTLTIRSLQ SEDFAVYYCQ QRRKWPVTFG GGTKVEIK | 108 |
| HC for Fab M287-E01 | |
| (SEQ ID NO: 171) | |
| EVQLLESGGG LVQPGGSLRL SCAASGFTFS QYPMWWVRQA PGKGLEWVSY IVPSGGRTYY | 60 |
| ADSVKGRFTI SRDNSKNTLY LQMNSLRAED TAVYYCAKDR AYGDYVGWNG FDYWGQGTLV | 120 |
| TVSS | 124 |
| LC for Fab M286-B09 | |
| (SEQ ID NO: 172) | |
| QDIQMTQSPA TLSVSPGEKV TLSCRASQNI ITNLAWYQQK PGQAPRLLIY GASTRATGIP | 60 |
| ARFSGSGSGT DFTLTISSLE PEDFAVYYCQ QRSNWPITFG PGTKVDIK | 108 |
| HC for Fab M286-B09 | |
| (SEQ ID NO: 173) | |
| EVQLLESGGG LVQPGGSLRL SCAASGFTFS QYPMWWVRQA PGKGLEWVSY IVPSGGRTYY | 60 |
| ADSVKGRFTI SRDNSKNTLY LQMNSLRAED TAVYYCAKDR AYGDYVGWNG FDYWGQGTLV | 120 |
| TVSS | 124 |
| LC for Fab M294-A12 | |
| (SEQ ID NO: 174) | |
| QDIQMTQSPA TLSVSPGERA TLSCRASHSV GSDLAWYQQK PGQAPRLLIS GASTRTAGIP | 60 |
| ARFSGSGSGT DFTLTISNLE PEDFAVYYCQ QRGNWPPTFG GGTKVEIR | 108 |
| HC for Fab M294-A12 | |
| (SEQ ID NO: 175) | |
| EVQLLESGGG LVQPGGSLRL SCAASGFTFS QYPMWWVRQA PGKGLEWVSY IVPSGGRTYY | 60 |
| ADSVKGRFTI SRDNSKNTLY LQMNSLRAED TAVYYCAKDR AYGDYVGWNG FDYWGQGTLV | 120 |
| TVSS | 124 |
| LC for Fab M287-C12 | |
| (SEQ ID NO: 176) | |
| QDIQMTQSPA TLSVSPGERA TLSCRASQGV GSDLAWYLQK PGQAPRLLIY GASSRATGIP | 60 |
| DRFSGSGSGT DFTLTISRLE PEDFAVYYCQ QRRSWPPTFG QGTKVEIK | 108 |
| HC for Fab M287-C12 | |
| (SEQ ID NO: 177) | |
| EVQLLESGGG LVQPGGSLRL SCAASGFTFS QYPMWWVRQA PGKGLEWVSY IVPSGGRTYY | 60 |
| ADSVKGRFTI SRDNSKNTLY LQMNSLRAED TAVYYCAKDR AYGDYVGWNG FDYWGQGTLV | 120 |
| TVSS | 124 |
| LC for Fab M290-C09 | |
| (SEQ ID NO: 178) | |
| QDIQMTQSPA TLSVSPGERA TLSCRASQNV NRDLAWYQQK PGQAPRLLIF GASTRATGIP | 60 |
| ARFSGSGSGT DFTLTISSLE PEDFAVYFCQ QRGNWPITFG QGTRLEIK | 108 |
| HC for Fab M290-C09 | |
| (SEQ ID NO: 179) | |
| EVQLLESGGG LVQPGGSLRL SCAASGFTFS QYPMWWVRQA PGKGLEWVSY IVPSGGRTYY | 60 |
| ADSVKGRFTI SRDNSKNTLY LQMNSLRAED TAVYYCAKDR AYGDYVGWNG FDYWGQGTLV | 120 |
| TVSS | 124 |
| LC for Fab M294-C10 | |
| (SEQ ID NO: 180) | |
| QDIQMTQSPA TLSVSPGERA TLSCRASQSI NSDLAWYQQK PGQAPRLLIY HTSYRAPGIP | 60 |
| ARFRGSGSGT DFTLTISSLE PEDFALYFCQ QRSDWPVTFG PGTKVDVK | 108 |
| HC for Fab M294-C10 | |
| (SEQ ID NO: 181) | |
| EVQLLESGGG LVQPGGSLRL SCAASGFTFS QYPMWWVRQA PGKGLEWVSY IVPSGGRTYY | 60 |
| ADSVKGRFTI SRDNSKNTLY LQMNSLRAED TAVYYCAKDR AYGDYVGWNG FDYWGQGTLV | 120 |
| TVSS | 124 |
| LC for Fab M278-D06 | |
| (SEQ ID NO: 182) | |
| QDIQMTQSPA TLSVSPGERA TLSCRASQSI SSDLAWYQQR PGQAPRLLIY GASSRATGVP | 60 |
| ARFSGSGSGT EFALTISSLE PEDFAVYYCQ QRSYWPVTFG GGTRVEIK | 108 |
| HC for Fab M278-D06 | |
| (SEQ ID NO: 183) | |
| EVQLLESGGG LVQPGGSLRL SCAASGFTFS QYPMWWVRQA PGKGLEWVSY IVPSGGRTYY | 60 |
| ADSVKGRFTI SRDNSKNTLY LQMNSLRAED TAVYYCAKDR AYGDYVGWNG FDYWGQGTLV | 120 |
| TVSS | 124 |
| LC for Fab M290-E01 | |
| (SEQ ID NO: 184) | |
| QDIQMTQSPA TLSVSPGERA TLSCRASQSI SSFLAWYQQK PGQAPRLLIY DASYRATGIP | 60 |
| ARFSGSGSGT DFTLTISSLE PEDYAVYYCQ QRGNWPITFG QGTRLEIK | 108 |
| HC for Fab M290-E01 | |
| (SEQ ID NO: 185) | |
| EVQLLESGGG LVQPGGSLRL SCAASGFTFS QYPMWWVRQA PGKGLEWVSY IVPSGGRTYY | 60 |
| ADSVKGRFTI SRDNSKNTLY LQMNSLRAED TAVYYCAKDR AYGDYVGWNG FDYWGQGTLV | 120 |
| TVSS | 124 |
| LC for Fab M293-E09 | |
| (SEQ ID NO: 186) | |
| QDIQMTQSPA TLSVSPGERA TLSCRASQSV GADLAWYQQK PGQAPRLLIY HASTRATGVP | 60 |
| ARFSGSGSGS EFTLAISSLQ SEDFAVYFCQ QRGNWPPTFG GGTKVDIK | 108 |
| HC for Fab M293-E09 | |
| (SEQ ID NO: 187) | |
| EVQLLESGGG LVQPGGSLRL SCAASGFTFS QYPMWWVRQA PGKGLEWVSY IVPSGGRTYY | 60 |
| ADSVKGRFTI SRDNSKNTLY LQMNSLRAED TAVYYCAKDR AYGDYVGWNG FDYWGQGTLV | 120 |
| TVSS | 124 |
| LC for Fab M288-G11 | |
| (SEQ ID NO: 188) | |
| QDIQMTQSPA TLSVSPGERA TLSCRASQSV GSDLAWYQQK HGQAPRLLMY GASHRATGIP | 60 |
| ARFSGSGSGT DFTLTISSLE PEDFAVYYCQ QRYNWPITFG GGTKVEIK | 108 |
| HC for Fab M288-G11 | |
| (SEQ ID NO: 189) | |
| EVQLLESGGG LVQPGGSLRL SCAASGFTFS QYPMWWVRQA PGKGLEWVSY IVPSGGRTYY | 60 |
| ADSVKGRFTI SRDNSKNTLY LQMNSLRAED TAVYYCAKDR AYGDYVGWNG FDYWGQGTLV | 120 |
| TVSS | 124 |
| LC for Fab M284-B09 | |
| (SEQ ID NO: 190) | |
| QDIQMTQSPA TLSVSPGERA TLSCRASQSV GSDLAWYQQK HGQAPRLLMY GASTRATGIP | 60 |
| DRFSGSGSGT DFTLTISRLE PEDFAVYYCQ QRGNWPPTFG GGTKVEIR | 108 |
| HC for Fab M284-B09 | |
| (SEQ ID NO: 191) | |
| EVQLLESGGG LVQPGGSLRL SCAASGFTFS QYPMWWVRQA PGKGLEWVSY IVPSGGRTYY | 60 |
| ADSVKGRFTI SRDNSKNTLY LQMNSLRAED TAVYYCAKDR AYGDYVGWNG FDYWGQGTLV | 120 |
| TVSS | 124 |
| LC for Fab M297-A11 | |
| (SEQ ID NO: 192) | |
| QDIQMTQSPA TLSVSPGERA TLSCRASQSV GSNLAWYQQK PGQAPRLLIY GASIRATGIP | 60 |
| ARFSGSGSGT DFTLTISSLE PEDFAVYFCQ QRGNWPITFG QGTRLEIK | 108 |
| HC for Fab M297-A11 | |
| (SEQ ID NO: 193) | |
| EVQLLESGGG LVQPGGSLRL SCAASGFTFS QYPMWWVRQA PGKGLEWVSY IVPSGGRTYY | 60 |
| ADSVKGRFTI SRDNSKNTLY LQMNSLRAED TAVYYCAKDR AYGDYVGWNG FDYWGQGTLV | 120 |
| TVSS | 124 |
| LC for Fab M294-F06 | |
| (SEQ ID NO: 194) | |
| QDIQMTQSPA TLSVSPGERA TLSCRASQSV GSNLAWYQQK PGQAPRLLIY GASTRATGIP | 60 |
| ARFSGSGSGT EFTLTISSLQ SEDFAMYYCQ QRAYWPVSFG GGTKVEIK | 108 |
| HC for Fab M294-F06 | |
| (SEQ ID NO: 195) | |
| EVQLLESGGG LVQPGGSLRL SCAASGFTFS QYPMWWVRQA PGKGLEWVSY IVPSGGRTYY | 60 |
| ADSVKGRFTI SRDNSKNTLY LQMNSLRAED TAVYYCAKDR AYGDYVGWNG FDYWGQGTLV | 120 |
| TVSS | 124 |
| LC for Fab M295-E02 | |
| (SEQ ID NO: 196) | |
| QDIQMTQSPA TLSVSPGERA TLSCRASQSV GSNLAWYQQK PGQAPRLLIY GASTRATGIP | 60 |
| ARFSGSGSGT EFTLTISSLQ SEDFAVYYCQ QRGNWPITFG QGTRLEIK | 108 |
| HC for Fab M295-E02 | |
| (SEQ ID NO: 197) | |
| EVQLLESGGG LVQPGGSLRL SCAASGFTFS QYPMWWVRQA PGKGLEWVSY IVPSGGRTYY | 60 |
| ADSVKGRFTI SRDNSKNTLY LQMNSLRAED TAVYYCAKDR AYGDYVGWNG FDYWGQGTLV | 120 |
| TVSS | 124 |
| LC for Fab M289-H10 | |
| (SEQ ID NO: 198) | |
| QDIQMTQSPA TLSVSPGERA TLSCRASQSV GSNLAWYQQK PGQAPRLLIY GASTRATGIP | 60 |
| ARFSGSGSGT EFTLTVSSLQ SEDFAVYYCQ QRRNWPVTFG PGTKLDFK | 108 |
| HC for Fab M289-H10 | |
| (SEQ ID NO: 199) | |
| EVQLLESGGG LVQPGGSLRL SCAASGFTFS QYPMWWVRQA PGKGLEWVSY IVPSGGRTYY | 60 |
| ADSVKGRFTI SRDNSKNTLY LQMNSLRAED TAVYYCAKDR AYGDYVGWNG FDYWGQGTLV | 120 |
| TVSS | 124 |
| LC for Fab M283-E03 | |
| (SEQ ID NO: 200) | |
| QDIQMTQSPA TLSVSPGERA TLSCRASQSV GSQLAWYQQK PGQAPRLVVY DASTRATGIP | 60 |
| ARFSGSGSGT DFTLTISSLE PEDYAVYYCQ QRGNWPITFG QGTRLEIK | 108 |
| HC for Fab M283-E03 | |
| (SEQ ID NO: 201) | |
| EVQLLESGGG LVQPGGSLRL SCAASGFTFS QYPMWWVRQA PGKGLEWVSY IVPSGGRTYY | 60 |
| ADSVKGRFTI SRDNSKNTLY LQMNSLRAED TAVYYCAKDR AYGDYVGWNG FDYWGQGTLV | 120 |
| TVSS | 124 |
| LC for Fab M279-E12 | |
| (SEQ ID NO: 202) | |
| QDIQMTQSPA TLSVSPGERA TLSCRASQSV NSDLAWYQQK PGQAPRLLIY GASTRATGIP | 60 |
| ARFSGSGSGT DFTLTISSLE PEDYAVYYCQ QRGNWPITFG QGTRLEIK | 108 |
| HC for Fab M279-E12 | |
| (SEQ ID NO: 203) | |
| EVQLLESGGG LVQPGGSLRL SCAASGFTFS QYPMWWVRQA PGKGLEWVSY IVPSGGRTYY | 60 |
| ADSVKGRFTI SRDNSKNTLY LQMNSLRAED TAVYYCAKDR AYGDYVGWNG FDYWGQGTLV | 120 |
| TVSS | 124 |
| LC for Fab M290-A11 | |
| (SEQ ID NO: 204) | |
| QDIQMTQSPA TLSVSPGERA TLSCRASQSV NTDLAWYQQK PGQAPRLLIY GASTRATGIP | 60 |
| ARFSGSGSGT EFTLTISSLQ SEDFAVYYCQ QRRNWPVTFG QGTRLEII | 108 |
| HC for Fab M290-A11 | |
| (SEQ ID NO: 205) | |
| EVQLLESGGG LVQPGGSLRL SCAASGFTFS QYPMWWVRQA PGKGLEWVSY IVPSGGRTYY | 60 |
| ADSVKGRFTI SRDNSKNTLY LQMNSLRAED TAVYYCAKDR AYGDYVGWNG FDYWGQGTLV | 120 |
| TVSS | 124 |
| LC for Fab M284-G09 | |
| (SEQ ID NO: 206) | |
| QDIQMTQSPA TLSVSPGERA TLSCRASQSV SSDLAWYQQI PGQAPRLLIY GASTRATGIP | 60 |
| VRFSGSGSGT NFTLTISSLE PEDFAVYYCQ QRRKWPVTFG GGTKVEIK | 108 |
| HC for Fab M284-G09 | |
| (SEQ ID NO: 207) | |
| EVQLLESGGG LVQPGGSLRL SCAASGFTFS QYPMWWVRQA PGKGLEWVSY IVPSGGRTYY | 60 |
| ADSVKGRFTI SRDNSKNTLY LQMNSLRAED TAVYYCAKDR AYGDYVGWNG FDYWGQGTLV | 120 |
| TVSS | 124 |
| LC for Fab M281-C06 | |
| (SEQ ID NO: 208) | |
| QDIQMTQSPA TLSVSPGERA TLSCRASQSV SSDLAWYQQK PGQAPRLLIY AASTRATGIP | 60 |
| ARFSGSGSGT EFTLTISSLQ SEDFAVYYCQ QRSNWPVTFG QGTKLEIK | 108 |
| HC for Fab M281-C06 | |
| (SEQ ID NO: 209) | |
| EVQLLESGGG LVQPGGSLRL SCAASGFTFS QYPMWWVRQA PGKGLEWVSY IVPSGGRTYY | 60 |
| ADSVKGRFTI SRDNSKNTLY LQMNSLRAED TAVYYCAKDR AYGDYVGWNG FDYWGQGTLV | 120 |
| TVSS | 124 |
| LC for Fab M279-C05 | |
| (SEQ ID NO: 210) | |
| QDIQMTQSPA TLSVSPGERA TLSCRASQSV SSDLAWYQQK PGQAPRLLIY HTSYRAPGIP | 60 |
| ARFRGSGSGT DFTLTISSLE PEDFALYFCQ QRSDWPVTFG PGTKVDVK | 108 |
| HC for Fab M279-C05 | |
| (SEQ ID NO: 211) | |
| EVQLLESGGG LVQPGGSLRL SCAASGFTFS QYPMWWVRQA PGKGLEWVSY IVPSGGRTYY | 60 |
| ADSVKGRFTI SRDNSKNTLY LQMNSLRAED TAVYYCAKDR AYGDYVGWNG FDYWGQGTLV | 120 |
| TVSS | 124 |
| LC for Fab M293-F04 | |
| (SEQ ID NO: 212) | |
| QDIQMTQSPA TLSVSPGERA TLSCRASQSV SSDLAWYQQK PGQAPRLLIY RASIRATGIP | 60 |
| ARFSGSGSGT DFTLTISSLE PEDFAVYFCQ QRGFWPITFG QGTRLEIK | 108 |
| HC for Fab M293-F04 | |
| (SEQ ID NO: 213) | |
| EVQLLESGGG LVQPGGSLRL SCAASGFTFS QYPMWWVRQA PGKGLEWVSY IVPSGGRTYY | 60 |
| ADSVKGRFTI SRDNSKNTLY LQMNSLRAED TAVYYCAKDR AYGDYVGWNG FDYWGQGTLV | 120 |
| TVSS | 124 |
| LC for Fab M296-G08 | |
| (SEQ ID NO: 214) | |
| QDIQMTQSPA TLSVSPGERA TLSCRASQSV SSDLAWYQQK PGQAPRLLIY RASIRATGIP | 60 |
| ARFSGSGSGT EFTLTISSLQ SEDFAVYYCQ QRSAWPVTFG GGSKVDIKRT | 110 |
| HC for Fab M296-G08 | |
| (SEQ ID NO: 215) | |
| EVQLLESGGG LVQPGGSLRL SCAASGFTFS QYPMWWVRQA PGKGLEWVSY IVPSGGRTYY | 60 |
| ADSVKGRFTI SRDNSKNTLY LQMNSLRAED TAVYYCAKDR AYGDYVGWNG FDYWGQGTLV | 120 |
| TVSS | 124 |
| LC for Fab M281-C10 | |
| (SEQ ID NO: 216) | |
| QDIQMTQSPA TLSVSPGERA TLSCRASQSV SSDLAWYQQR PGQAPRLLIF GASTRATGIP | 60 |
| ARFSGSGSGT DFSLTISSLE PEDFAVYYCQ QRSNWPPTFG GGTKVEIK | 108 |
| HC for Fab M281-C10 | |
| (SEQ ID NO: 217) | |
| EVQLLESGGG LVQPGGSLRL SCAASGFTFS QYPMWWVRQA PGKGLEWVSY IVPSGGRTYY | 60 |
| ADSVKGRFTI SRDNSKNTLY LQMNSLRAED TAVYYCAKDR AYGDYVGWNG FDYWGQGTLV | 120 |
| TVSS | 124 |
| LC for Fab M281-H10 | |
| (SEQ ID NO: 218) | |
| QDIQMTQSPA TLSVSPGERA TLSCRASQSV SSNLAWYQQK PGQAPRLLIY GASTRATGIP | 60 |
| ARFSGSGSGT EFTLTISSLE PEDFAVYYCQ QCYNWPPTFG QGTKVEIK | 108 |
| HC for Fab M281-H10 | |
| (SEQ ID NO: 219) | |
| EVQLLESGGG LVQPGGSLRL SCAASGFTFS QYPMWWVRQA PGKGLEWVSY IVPSGGRTYY | 60 |
| ADSVKGRFTI SRDNSKNTLY LQMNSLRAED TAVYYCAKDR AYGDYVGWNG FDYWGQGTLV | 120 |
| TVSS | 124 |
| LC for Fab M282-E04 | |
| (SEQ ID NO: 220) | |
| QDIQMTQSPA TLSVSPGERA TLSCRASQSV SSNLAWYQQK PGQAPRLLIY GASTRATGIP | 60 |
| ARFSGSGSGT EFTLTISSLQ SEDFAVYYCQ QRGNWPITFG QGTRLEIK | 108 |
| HC for Fab M282-E04 | |
| (SEQ ID NO: 221) | |
| EVQLLESGGG LVQPGGSLRL SCAASGFTFS QYPMWWVRQA PGKGLEWVSY IVPSGGRTYY | 60 |
| ADSVKGRFTI SRDNSKNTLY LQMNSLRAED TAVYYCAKDR AYGDYVGWNG FDYWGQGTLV | 120 |
| TVSS | 124 |
| LC for Fab M286-D09 | |
| (SEQ ID NO: 224) | |
| QDIQMTQSPA TLSVSPGERA TLSCRASQSV SSNLAWYQQK PGQAPRLLIY HASTRATGVP | 60 |
| ARFSGSGSGS EFTLAISSLE PEDFAVYFCQ QRGFWPITFG QGTRLEIK | 108 |
| HC for Fab M286-D09 | |
| (SEQ ID NO: 225) | |
| EVQLLESGGG LVQPGGSLRL SCAASGFTFS QYPMWWVRQA PGKGLEWVSY IVPSGGRTYY | 60 |
| ADSVKGRFTI SRDNSKNTLY LQMNSLRAED TAVYYCAKDR AYGDYVGWNG FDYWGQGTLV | 120 |
| TVSS | 124 |
| LC for Fab M279-F02 | |
| (SEQ ID NO: 226) | |
| QDIQMTQSPA TLSVSPGERA TLSCRASQSV SSYLAWYQQR PGQAPRLLIF GASNTATGIP | 60 |
| ARFSGSGSGT DFTLTISSLE PEDFGVYYCQ QRRNWPPTFG QGTKLEIK | 108 |
| HC for Fab M279-F02 | |
| (SEQ ID NO: 227) | |
| EVQLLESGGG LVQPGGSLRL SCAASGFTFS QYPMWWVRQA PGKGLEWVSY IVPSGGRTYY | 60 |
| ADSVKGRFTI SRDNSKNTLY LQMNSLRAED TAVYYCAKDR AYGDYVGWNG FDYWGQGTLV | 120 |
| TVSS | 124 |
| LC for Fab M292-E07 | |
| (SEQ ID NO: 228) | |
| QDIQMTQSPA TLSVSPGERA TLSCRASQSV WSNLAWYQQK PGQAPRLLIY DASYRATGIP | 60 |
| ARFSGSGSGT DFTLTISSLE PEDYAVYYCQ QRGNWPITFG QGTRLEIK | 108 |
| HC for Fab M292-E07 | |
| (SEQ ID NO: 229) | |
| EVQLLESGGG LVQPGGSLRL SCAASGFTFS QYPMWWVRQA PGKGLEWVSY IVPSGGRTYY | 60 |
| ADSVKGRFTI SRDNSKNTLY LQMNSLRAED TAVYYCAKDR AYGDYVGWNG FDYWGQGTLV | 120 |
| TVSS | 124 |
| LC for Fab M284-B10 | |
| (SEQ ID NO: 230) | |
| QDIQMTQSPA TLSVSPGERA TLSCRASQTV GTFLAWYQHR PGQAPRLLIY GASTRATGIP | 60 |
| ARFSGSGSGT EFTLTISSLE PEDFAVYYCQ QRSNWPPTFG QGTKVEIK | 108 |
| HC for Fab M284-B10 | |
| (SEQ ID NO: 231) | |
| EVQLLESGGG LVQPGGSLRL SCAASGFTFS QYPMWWVRQA PGKGLEWVSY IVPSGGRTYY | 60 |
| ADSVKGRFTI SRDNSKNTLY LQMNSLRAED TAVYYCAKDR AYGDYVGWNG FDYWGQGTLV | 120 |
| TVSS | 124 |
| LC for Fab M297-B06 | |
| (SEQ ID NO: 232) | |
| QDIQMTQSPA TLSVSPGERA TVSCRASESV NSDLAWYQQK PGQAPRLLIY GASTRATGIP | 60 |
| ARFSGSGSGT EFTLTISSME SEDFAVYYCQ QRGSWPITFG QGTRLEIK | 108 |
| HC for Fab M297-B06 | |
| (SEQ ID NO: 233) | |
| EVQLLESGGG LVQPGGSLRL SCAASGFTFS QYPMWWVRQA PGKGLEWVSY IVPSGGRTYY | 60 |
| ADSVKGRFTI SRDNSKNTLY LQMNSLRAED TAVYYCAKDR AYGDYVGWNG FDYWGQGTLV | 120 |
| TVSS | 124 |
| LC for Fab M280-B02 | |
| (SEQ ID NO: 234) | |
| QDIQMTQSPA TLSVSPGERV ILSCRASQNI NSDLAWYKQI PGQAPRLLIY GASTRATGVP | 60 |
| ARISGSGSGT EFTLTISSLQ SEDFAVYYCQ QRGGWPITFG GGTKVEIK | 108 |
| HC for Fab M280-B02 | |
| (SEQ ID NO: 235) | |
| EVQLLESGGG LVQPGGSLRL SCAASGFTFS QYPMWWVRQA PGKGLEWVSY IVPSGGRTYY | 60 |
| ADSVKGRFTI SRDNSKNTLY LQMNSLRAED TAVYYCAKDR AYGDYVGWNG FDYWGQGTLV | 120 |
| TVSS | 124 |
| LC for Fab M280-C09 | |
| (SEQ ID NO: 238) | |
| QDIQMTQSPA TLSVSPGERV TLSCRASQTI FGDLAWFQQK PGQSPRLLIY GASTRATDIP | 60 |
| ARFSGSGSGT EFTLTISSLE PEDFAVYYCQ QRSNWPPTFG GGTKVEIK | 108 |
| HC for Fab M280-C09 | |
| (SEQ ID NO: 239) | |
| EVQLLESGGG LVQPGGSLRL SCAASGFTFS QYPMWWVRQA PGKGLEWVSY IVPSGGRTYY | 60 |
| ADSVKGRFTI SRDNSKNTLY LQMNSLRAED TAVYYCAKDR AYGDYVGWNG FDYWGQGTLV | 120 |
| TVSS | 124 |
| LC for Fab M278-H03 | |
| (SEQ ID NO: 240) | |
| QDIQMTQSPA TLSVSPGERV TLSCRASRSV SNNVAWYQQK PGQAPRLLIS EASNRATGVP | 60 |
| ARFTGSGSGI DFSLSISSLE PEDFAIYYCQ QRGGWPITFG GGTKVEIK | 108 |
| HC for Fab M278-H03 | |
| (SEQ ID NO: 241) | |
| EVQLLESGGG LVQPGGSLRL SCAASGFTFS QYPMWWVRQA PGKGLEWVSY IVPSGGRTYY | 60 |
| ADSVKGRFTI SRDNSKNTLY LQMNSLRAED TAVYYCAKDR AYGDYVGWNG FDYWGQGTLV | 120 |
| TVSS | 124 |
| LC for Fab M284-G06 | |
| (SEQ ID NO: 242) | |
| QDIQMTQSPA TVSLSPGERV TLSCRASQSV SNYLAWYQQK PGQAPRLLIY GASNRATGIP | 60 |
| ARFSGSGSGT DFTLTISSLE PEDFAVYYCQ QRRSWPPTFG QGTKVEIK | 108 |
| HC for Fab M284-G06 | |
| (SEQ ID NO: 243) | |
| EVQLLESGGG LVQPGGSLRL SCAASGFTFS QYPMWWVRQA PGKGLEWVSY IVPSGGRTYY | 60 |
| ADSVKGRFTI SRDNSKNTLY LQMNSLRAED TAVYYCAKDR AYGDYVGWNG FDYWGQGTLV | 120 |
| TVSS | 124 |
| LC for Fab M284-G01 | |
| (SEQ ID NO: 244) | |
| QDIQMTQSPA TVSVSPGERA TLSCRASQSV GSDLAWYQQK PGQAPRLLIY GASTRATGIP | 60 |
| ARFSGSGSGT EFTLTITSLQ SEDFAVYYCQ QRSNWPVTFG GGTKVEIK | 108 |
| HC for Fab M284-G01 | |
| (SEQ ID NO: 245) | |
| EVQLLESGGG LVQPGGSLRL SCAASGFTFS QYPMWWVRQA PGKGLEWVSY IVPSGGRTYY | 60 |
| ADSVKGRFTI SRDNSKNTLY LQMNSLRAED TAVYYCAKDR AYGDYVGWNG FDYWGQGTLV | 120 |
| TVSS | 124 |
| LC for Fab M278-H12 | |
| (SEQ ID NO: 246) | |
| QDIQMTQSPD ILSLSPGERA TISCRASQSV NSHVAWYQQK PGQPPRLLIY EASDRAAGVP | 60 |
| ARFRGSGSGT LFSLTISSLQ PEDFVVYYCQ QRMYWPPTFG EGTKLERR | 108 |
| HC for Fab M278-H12 | |
| (SEQ ID NO: 247) | |
| EVQLLESGGG LVQPGGSLRL SCAASGFTFS QYPMWWVRQA PGKGLEWVSY IVPSGGRTYY | 60 |
| ADSVKGRFTI SRDNSKNTLY LQMNSLRAED TAVYYCAKDR AYGDYVGWNG FDYWGQGTLV | 120 |
| TVSS | 124 |
| LC for Fab M282-C08 | |
| (SEQ ID NO: 248) | |
| QDIQMTQSPD TLSLSPGERA TLTCRASQSL SRSDLAWYQQ RPGQAPRLLI FGASNRATDT | 60 |
| PDRFSGSGSG TDFTLTITRL EPEDFAVYYC QQRSNWPPTF GQGTKVEIT | 109 |
| HC for Fab M282-C08 | |
| (SEQ ID NO: 249) | |
| EVQLLESGGG LVQPGGSLRL SCAASGFTFS QYPMWWVRQA PGKGLEWVSY IVPSGGRTYY | 60 |
| ADSVKGRFTI SRDNSKNTLY LQMNSLRAED TAVYYCAKDR AYGDYVGWNG FDYWGQGTLV | 120 |
| TVSS | 124 |
| LC for Fab M283-C10 | |
| (SEQ ID NO: 250) | |
| QDIQMTQSPD TLSVSPGERA TLSCRASQNI GSNLAWYQHK SGQAPRLLIY GATTRATGIP | 60 |
| ARFSGSGSGT EFTLTISSLQ SEDFAVYFCQ QRGNWPITFG QGTRLEIK | 108 |
| HC for Fab M283-C10 | |
| (SEQ ID NO: 251) | |
| EVQLLESGGG LVQPGGSLRL SCAASGFTFS QYPMWWVRQA PGKGLEWVSY IVPSGGRTYY | 60 |
| ADSVKGRFTI SRDNSKNTLY LQMNSLRAED TAVYYCAKDR AYGDYVGWNG FDYWGQGTLV | 120 |
| TVSS | 124 |
| LC for Fab M279-H07 | |
| (SEQ ID NO: 252) | |
| QDIQMTQSPD TVSVSPGEGA TLSCRASQGI NNNLAWYQQK PGQAPRLLIY DASNRATGIP | 60 |
| ARFSGSGSGT DFTLTISSLE PEDFAVYFCQ QRGNWPITFG QGTRLEIK | 108 |
| HC for Fab M279-H07 | |
| (SEQ ID NO: 253) | |
| EVQLLESGGG LVQPGGSLRL SCAASGFTFS QYPMWWVRQA PGKGLEWVSY IVPSGGRTYY | 60 |
| ADSVKGRFTI SRDNSKNTLY LQMNSLRAED TAVYYCAKDR AYGDYVGWNG FDYWGQGTLV | 120 |
| TVSS | 124 |
| LC for Fab M280-F10 | |
| (SEQ ID NO: 254) | |
| QDIQMTQSPG TLSFSPGERA SLSCRASQSV SSDLAWYQQK PGQAPRLLIY GASNRATGIP | 60 |
| VRFSGSGSGT DFTLTISRLE PEDFAVYYCQ QRSKWPITFG QGTRLEIK | 108 |
| HC for Fab M280-F10 | |
| (SEQ ID NO: 255) | |
| EVQLLESGGG LVQPGGSLRL SCAASGFTFS QYPMWWVRQA PGKGLEWVSY IVPSGGRTYY | 60 |
| ADSVKGRFTI SRDNSKNTLY LQMNSLRAED TAVYYCAKDR AYGDYVGWNG FDYWGQGTLV | 120 |
| TVSS | 124 |
| LC for Fab M281-F01 | |
| (SEQ ID NO: 256) | |
| QDIQMTQSPG TLSLSPGDRA TLSCRASQSV GSDLAWYQQK PGQAPRLLIY GASNRATGIP | 60 |
| VRFSGSGSGT DFTLTISSLE PEDFAVYYCQ QRSNWPITFG QGTRLEIK | 108 |
| HC for Fab M281-F01 | |
| (SEQ ID NO: 257) | |
| EVQLLESGGG LVQPGGSLRL SCAASGFTFS QYPMWWVRQA PGKGLEWVSY IVPSGGRTYY | 60 |
| ADSVKGRFTI SRDNSKNTLY LQMNSLRAED TAVYYCAKDR AYGDYVGWNG FDYWGQGTLV | 120 |
| TVSS | 124 |
| LC for Fab M284-F10 | |
| (SEQ ID NO: 258) | |
| QDIQMTQSPG TLSLSPGDRA TLSCRASQSV GSFLAWYQQR PGQAPRLLIY GASNRAPGIP | 60 |
| ARFSGSGSGT DFTLTISSLE PEDFAVYFCQ QRHNWPITFG QGTRLEIK | 108 |
| HC for Fab M284-F10 | |
| (SEQ ID NO: 259) | |
| EVQLLESGGG LVQPGGSLRL SCAASGFTFS QYPMWWVRQA PGKGLEWVSY IVPSGGRTYY | 60 |
| ADSVKGRFTI SRDNSKNTLY LQMNSLRAED TAVYYCAKDR AYGDYVGWNG FDYWGQGTLV | 120 |
| TVSS | 124 |
| LC for Fab M286-E06 | |
| (SEQ ID NO: 260) | |
| QDIQMTQSPG TLSLSPGEGA TLSCRASQSV SNYLAWYQQK PGQAPRLLIY GVSNRATGIP | 60 |
| DRFSGSGSGT DFTLTISRLE PEDFAVYYCQ QRGNWPPTFG GGTKVEIR | 108 |
| HC for Fab M286-E06 | |
| (SEQ ID NO: 261) | |
| EVQLLESGGG LVQPGGSLRL SCAASGFTFS QYPMWWVRQA PGKGLEWVSY IVPSGGRTYY | 60 |
| ADSVKGRFTI SRDNSKNTLY LQMNSLRAED TAVYYCAKDR AYGDYVGWNG FDYWGQGTLV | 120 |
| TVSS | 124 |
| LC for Fab M294-G09 | |
| (SEQ ID NO: 262) | |
| QDIQMTQSPG TLSLSPGERA TLSCRASQNL GRSDLAWYQQ KPGQAPKFLI FGVSNRATGT | 60 |
| PDRFSGSGSG TDFTLTISSL EPEDFAVYYC QQRSNWPPTF GGGTKVEIK | 109 |
| HC for Fab M294-G09 | |
| (SEQ ID NO: 263) | |
| EVQLLESGGG LVQPGGSLRL SCAASGFTFS QYPMWWVRQA PGKGLEWVSY IVPSGGRTYY | 60 |
| ADSVKGRFTI SRDNSKNTLY LQMNSLRAED TAVYYCAKDR AYGDYVGWNG FDYWGQGTLV | 120 |
| TVSS | 124 |
| LC for Fab M285-H12 | |
| (SEQ ID NO: 264) | |
| QDIQMTQSPG TLSLSPGERA TLSCRASQNV HTYLAWYQQK PGQAPRLLIS EASNRATGVP | 60 |
| ARFTGSGSGI DFSLSISSLE PEDFAIYYCQ QRGGWPITFG GGTKVEIK | 108 |
| HC for Fab M285-H12 | |
| (SEQ ID NO: 265) | |
| EVQLLESGGG LVQPGGSLRL SCAASGFTFS QYPMWWVRQA PGKGLEWVSY IVPSGGRTYY | 60 |
| ADSVKGRFTI SRDNSKNTLY LQMNSLRAED TAVYYCAKDR AYGDYVGWNG FDYWGQGTLV | 120 |
| TVSS | 124 |
| LC for Fab M278-D08 | |
| (SEQ ID NO: 266) | |
| QDIQMTQSPG TLSLSPGERA TLSCRASQSI SSFLAWYQQK PGQAPRLLIY DASYRATGIP | 60 |
| ARFSGSGSGT DFTLTISSLE PEDYAVYYCQ QRGNWPITFG QGTRLEIK | 108 |
| HC for Fab M278-D08 | |
| (SEQ ID NO: 267) | |
| EVQLLESGGG LVQPGGSLRL SCAASGFTFS QYPMWWVRQA PGKGLEWVSY IVPSGGRTYY | 60 |
| ADSVKGRFTI SRDNSKNTLY LQMNSLRAED TAVYYCAKDR AYGDYVGWNG FDYWGQGTLV | 120 |
| TVSS | 124 |
| LC for Fab M281-E06 | |
| (SEQ ID NO: 268) | |
| QDIQMTQSPG TLSLSPGERA TLSCRASQSL GRGDLAWYQQ NPGQPPRLLI YGASSRATGI | 60 |
| PDRFSGSGSG TDFTLTISRL EPEDFAVYYC QQRSNWPPTF GGGTKVEIK | 109 |
| HC for Fab M281-E06 | |
| (SEQ ID NO: 269) | |
| EVQLLESGGG LVQPGGSLRL SCAASGFTFS QYPMWWVRQA PGKGLEWVSY IVPSGGRTYY | 60 |
| ADSVKGRFTI SRDNSKNTLY LQMNSLRAED TAVYYCAKDR AYGDYVGWNG FDYWGQGTLV | 120 |
| TVSS | 124 |
| LC for Fab M284-A06 | |
| (SEQ ID NO: 270) | |
| QDIQMTQSPG TLSLSPGERA TLSCRASQSL GRSDLAWYQQ KPGQAPRLLI FGVSNRVTGT | 60 |
| PDRFSGSGSG TDFTLTIGSL EPEDFAVYYC QQRSNWPSTF GQGTRLEIK | 109 |
| HC for Fab M284-A06 | |
| (SEQ ID NO: 271) | |
| EVQLLESGGG LVQPGGSLRL SCAASGFTFS QYPMWWVRQA PGKGLEWVSY IVPSGGRTYY | 60 |
| ADSVKGRFTI SRDNSKNTLY LQMNSLRAED TAVYYCAKDR AYGDYVGWNG FDYWGQGTLV | 120 |
| TVSS | 124 |
| LC for Fab M283-B06 | |
| (SEQ ID NO: 272) | |
| QDIQMTQSPG TLSLSPGERA TLSCRASQSL SGNYLAWYQQ KPGQAPRLLI YGASSRATGV | 60 |
| SDRFSGSGSG TDFTLTISRL EPEDFAVYYC QQRSNWPITF GQGTRLEIK | 109 |
| HC for Fab M283-B06 | |
| (SEQ ID NO: 273) | |
| EVQLLESGGG LVQPGGSLRL SCAASGFTFS QYPMWWVRQA PGKGLEWVSY IVPSGGRTYY | 60 |
| ADSVKGRFTI SRDNSKNTLY LQMNSLRAED TAVYYCAKDR AYGDYVGWNG FDYWGQGTLV | 120 |
| TVSS | 124 |
| LC for Fab M286-H01 | |
| (SEQ ID NO: 274) | |
| QDIQMTQSPG TLSLSPGERA TLSCRASQSV ARYLAWYQQK PGQAPRLLIY GASRRGTGIP | 60 |
| DRFSGSGSGT DFTLTISSLE PEDFAVYYCQ QRRKWPVTFG PGTKVDIK | 108 |
| HC for Fab M286-H01 | |
| (SEQ ID NO: 275) | |
| EVQLLESGGG LVQPGGSLRL SCAASGFTFS QYPMWWVRQA PGKGLEWVSY IVPSGGRTYY | 60 |
| ADSVKGRFTI SRDNSKNTLY LQMNSLRAED TAVYYCAKDR AYGDYVGWNG FDYWGQGTLV | 120 |
| TVSS | 124 |
| LC for Fab M294-C09 | |
| (SEQ ID NO: 276) | |
| QDIQMTQSPG TLSLSPGERA TLSCRASQSV GADLAWYQQK PGQAPRLLIY HASTRATGVP | 60 |
| ARFSGSGSGS EFTLAISSLQ SEDFAVYFCQ QRGFWPITFG QGTRLEIK | 108 |
| HC for Fab M294-C09 | |
| (SEQ ID NO: 277) | |
| EVQLLESGGG LVQPGGSLRL SCAASGFTFS QYPMWWVRQA PGKGLEWVSY IVPSGGRTYY | 60 |
| ADSVKGRFTI SRDNSKNTLY LQMNSLRAED TAVYYCAKDR AYGDYVGWNG FDYWGQGTLV | 120 |
| TVSS | 124 |
| LC for Fab M297-A02 | |
| (SEQ ID NO: 278) | |
| QDIQMTQSPG TLSLSPGERA TLSCRASQSV GSDLAWYQQK PGQAPRLLIY GASTRATGIP | 60 |
| GRFSGSGSGT EFTLTISSLE PEDFGVYYCQ QRRSWPPTFG GGTKVEIK | 108 |
| HC for Fab M297-A02 | |
| (SEQ ID NO: 279) | |
| EVQLLESGGG LVQPGGSLRL SCAASGFTFS QYPMWWVRQA PGKGLEWVSY IVPSGGRTYY | 60 |
| ADSVKGRFTI SRDNSKNTLY LQMNSLRAED TAVYYCAKDR AYGDYVGWNG FDYWGQGTLV | 120 |
| TVSS | 124 |
| LC for Fab M283-B05 | |
| (SEQ ID NO: 280) | |
| QDIQMTQSPG TLSLSPGERA TLSCRASQSV GSDLAWYQQN PGQAPRLLIY GTSTRATGIP | 60 |
| ARFSGSGSGT DFTLTISSLQ SEDFAVYFCQ QRGNWPITFG QGTRLEIK | 108 |
| HC for Fab M283-B05 | |
| (SEQ ID NO: 281) | |
| EVQLLESGGG LVQPGGSLRL SCAASGFTFS QYPMWWVRQA PGKGLEWVSY IVPSGGRTYY | 60 |
| ADSVKGRFTI SRDNSKNTLY LQMNSLRAED TAVYYCAKDR AYGDYVGWNG FDYWGQGTLV | 120 |
| TVSS | 124 |
| LC for Fab M295-A04 | |
| (SEQ ID NO: 282) | |
| QDIQMTQSPG TLSLSPGERA TLSCRASQSV GSNFLAWYQQ KPGQAPRLLI KGASSRASGI | 60 |
| PDRFSGSGSG TDFTLTISRV EPEDFAVYYC QQRSSWPITF GQGTRLDIK | 109 |
| HC for Fab M295-A04 | |
| (SEQ ID NO: 283) | |
| EVQLLESGGG LVQPGGSLRL SCAASGFTFS QYPMWWVRQA PGKGLEWVSY IVPSGGRTYY | 60 |
| ADSVKGRFTI SRDNSKNTLY LQMNSLRAED TAVYYCAKDR AYGDYVGWNG FDYWGQGTLV | 120 |
| TVSS | 124 |
| LC for Fab M278-D02 | |
| (SEQ ID NO: 284) | |
| QDIQMTQSPG TLSLSPGERA TLSCRASQSV NSNLAWYQQK PGQAPRLLIH EASNRATGIP | 60 |
| DRFSGSGSER DFTLTISRLE PEDFAMYYCQ QRAYWPVSFG GGTKVEIK | 108 |
| HC for Fab M278-D02 | |
| (SEQ ID NO: 285) | |
| EVQLLESGGG LVQPGGSLRL SCAASGFTFS QYPMWWVRQA PGKGLEWVSY IVPSGGRTYY | 60 |
| ADSVKGRFTI SRDNSKNTLY LQMNSLRAED TAVYYCAKDR AYGDYVGWNG FDYWGQGTLV | 120 |
| TVSS | 124 |
| LC for Fab M280-C11 | |
| (SEQ ID NO: 286) | |
| QDIQMTQSPG TLSLSPGERA TLSCRASQSV SRHLAWYQQK PGQAPRLLIY GASNRATGIP | 60 |
| ARFSGSGSGT DFTLTISSLE SEDFAVYYCQ QRYNWPITFG QGTRLEIK | 108 |
| HC for Fab M280-C11 | |
| (SEQ ID NO: 287) | |
| EVQLLESGGG LVQPGGSLRL SCAASGFTFS QYPMWWVRQA PGKGLEWVSY IVPSGGRTYY | 60 |
| ADSVKGRFTI SRDNSKNTLY LQMNSLRAED TAVYYCAKDR AYGDYVGWNG FDYWGQGTLV | 120 |
| TVSS | 124 |
| LC for Fab M281-F10 | |
| (SEQ ID NO: 288) | |
| QDIQMTQSPG TLSLSPGERA TLSCRASQSV SSDVAWYQQR PGQAPRLLIY GASARATGVP | 60 |
| ARFSGSGSGT EFTLTISSLE PEDFAVYYCQ QRGNWPITFG QGTRLEIK | 108 |
| HC for Fab M281-F10 | |
| (SEQ ID NO: 289) | |
| EVQLLESGGG LVQPGGSLRL SCAASGFTFS QYPMWWVRQA PGKGLEWVSY IVPSGGRTYY | 60 |
| ADSVKGRFTI SRDNSKNTLY LQMNSLRAED TAVYYCAKDR AYGDYVGWNG FDYWGQGTLV | 120 |
| TVSS | 124 |
| LC for Fab M297-G08 | |
| (SEQ ID NO: 290) | |
| QDIQMTQSPG TLSLSPGERA TLSCRASQSV SSNLAWYQQK PGQAPRLLIY DASYRATGIP | 60 |
| ARFSGSGSGT DFTLTISSLE PEDYAVYYCQ QRGNWPITFG QGTRLEIK | 108 |
| HC for Fab M297-G08 | |
| (SEQ ID NO: 291) | |
| EVQLLESGGG LVQPGGSLRL SCAASGFTFS QYPMWWVRQA PGKGLEWVSY IVPSGGRTYY | 60 |
| ADSVKGRFTI SRDNSKNTLY LQMNSLRAED TAVYYCAKDR AYGDYVGWNG FDYWGQGTLV | 120 |
| TVSS | 124 |
| LC for Fab M279-G06 | |
| (SEQ ID NO: 292) | |
| QDIQMTQSPG TLSLSPGERA TLSCRASQSV SSSHLAWYQQ KPGQAPRLLI YGASNRATGI | 60 |
| PDRFSGSGSG TDFTLTISSL EPEDFAVYYC QQRRNWPPTF GQGTKLEIK | 109 |
| HC for Fab M279-G06 | |
| (SEQ ID NO: 293) | |
| EVQLLESGGG LVQPGGSLRL SCAASGFTFS QYPMWWVRQA PGKGLEWVSY IVPSGGRTYY | 60 |
| ADSVKGRFTI SRDNSKNTLY LQMNSLRAED TAVYYCAKDR AYGDYVGWNG FDYWGQGTLV | 120 |
| TVSS | 124 |
| LC for Fab M287-F09 | |
| (SEQ ID NO: 294) | |
| QDIQMTQSPG TLSLSPGERA TLSCRASQSV SSSQIAWYQQ KPGQAPTILI YGASYRATGI | 60 |
| PDRFSGSGSG TDFTLTISSL EPEDFAVYYC QQRSNWPVTF GGGTKVEIK | 109 |
| HC for Fab M287-F09 | |
| (SEQ ID NO: 295) | |
| EVQLLESGGG LVQPGGSLRL SCAASGFTFS QYPMWWVRQA PGKGLEWVSY IVPSGGRTYY | 60 |
| ADSVKGRFTI SRDNSKNTLY LQMNSLRAED TAVYYCAKDR AYGDYVGWNG FDYWGQGTLV | 120 |
| TVSS | 124 |
| LC for Fab M279-C02 | |
| (SEQ ID NO: 296) | |
| QDIQMTQSPG TLSLSPGERA TLSCRASQSV SSSQLAWYQQ KPGQAPRLLI YGASNRATAI | 60 |
| PARFSGSGSG TDFTLTISSL EPDDSAVYYC QQRSRWPITF GQGTRLEIK | 109 |
| HC for Fab M279-C02 | |
| (SEQ ID NO: 297) | |
| EVQLLESGGG LVQPGGSLRL SCAASGFTFS QYPMWWVRQA PGKGLEWVSY IVPSGGRTYY | 60 |
| ADSVKGRFTI SRDNSKNTLY LQMNSLRAED TAVYYCAKDR AYGDYVGWNG FDYWGQGTLV | 120 |
| TVSS | 124 |
| LC for Fab M287-H12 | |
| (SEQ ID NO: 298) | |
| QDIQMTQSPG TLSLSPGERA TLSCRASQSV SSSQLAWYQQ KPGQAPRLLI YGASNRATGI | 60 |
| PARFSGSGSG TDFTLTISSL EPEDFAVYYC QQRSNWPVTF GGGTKVEIK | 109 |
| HC for Fab M287-H12 | |
| (SEQ ID NO: 299) | |
| EVQLLESGGG LVQPGGSLRL SCAASGFTFS QYPMWWVRQA PGKGLEWVSY IVPSGGRTYY | 60 |
| ADSVKGRFTI SRDNSKNTLY LQMNSLRAED TAVYYCAKDR AYGDYVGWNG FDYWGQGTLV | 120 |
| TVSS | 124 |
| LC for Fab M278-E01 | |
| (SEQ ID NO: 300) | |
| QDIQMTQSPG TLSLSPGERA TLSCRASQSV SSSQLAWYQQ KPGQAPRLLI YGASSRATGI | 60 |
| PDRFSGSGSG TDFTLTISRL EPEDFAVYYC QQRGNWPITF GQGTRLEIK | 109 |
| HC for Fab M278-E01 | |
| (SEQ ID NO: 301) | |
| EVQLLESGGG LVQPGGSLRL SCAASGFTFS QYPMWWVRQA PGKGLEWVSY IVPSGGRTYY | 60 |
| ADSVKGRFTI SRDNSKNTLY LQMNSLRAED TAVYYCAKDR AYGDYVGWNG FDYWGQGTLV | 120 |
| TVSS | 124 |
| LC for Fab M286-D06 | |
| (SEQ ID NO: 302) | |
| QDIQMTQSPG TLSLSPGERA TLSCRASQSV SSSQLAWYQQ KPGQAPSLLI YGASNRATGI | 60 |
| PDRFSGSGSG TDFTLTISSL EPEDFAVYYC QQRSNWPVTF GQGTRLEIK | 109 |
| HC for Fab M286-D06 | |
| (SEQ ID NO: 303) | |
| EVQLLESGGG LVQPGGSLRL SCAASGFTFS QYPMWWVRQA PGKGLEWVSY IVPSGGRTYY | 60 |
| ADSVKGRFTI SRDNSKNTLY LQMNSLRAED TAVYYCAKDR AYGDYVGWNG FDYWGQGTLV | 120 |
| TVSS | 124 |
| LC for Fab M283-G08 | |
| (SEQ ID NO: 304) | |
| QDIQMTQSPG TLSLSPGERA TLSCRASQSV SSSYLAWYQQ KPGQAPRLLI YDASSRATGI | 60 |
| PDRFSGSGSG TDFTLTISSL EPEDFAVYYC QQRHTWPITF GQGTRLEIK | 109 |
| HC for Fab M283-G08 | |
| (SEQ ID NO: 305) | |
| EVQLLESGGG LVQPGGSLRL SCAASGFTFS QYPMWWVRQA PGKGLEWVSY IVPSGGRTYY | 60 |
| ADSVKGRFTI SRDNSKNTLY LQMNSLRAED TAVYYCAKDR AYGDYVGWNG FDYWGQGTLV | 120 |
| TVSS | 124 |
| LC for Fab M279-A11 | |
| (SEQ ID NO: 306) | |
| QDIQMTQSPG TLSLSPGERG TLSCRASQSV DNHLAWYQHK PGQAPRLLIY GASTRATGIP | 60 |
| ARFSGSGSGT DFTLTISSLE PEDFAVYYCQ QRRKWPVTFG GGTKVEIK | 108 |
| HC for Fab M279-A11 | |
| (SEQ ID NO: 307) | |
| EVQLLESGGG LVQPGGSLRL SCAASGFTFS QYPMWWVRQA PGKGLEWVSY IVPSGGRTYY | 60 |
| ADSVKGRFTI SRDNSKNTLY LQMNSLRAED TAVYYCAKDR AYGDYVGWNG FDYWGQGTLV | 120 |
| TVSS | 124 |
| LC for Fab M287-C11 | |
| (SEQ ID NO: 308) | |
| QDIQMTQSPG TLSLSPGETA TLSCRASQPV GSYLAWYQQK PGQAPRLLIY GASNRATGIP | 60 |
| ARFSGSGSGT DFTLAISSLE PEDFAVYYCQ QRSNWPITFG QGTRLEIK | 108 |
| HC for Fab M287-C11 | |
| (SEQ ID NO: 309) | |
| EVQLLESGGG LVQPGGSLRL SCAASGFTFS QYPMWWVRQA PGKGLEWVSY IVPSGGRTYY | 60 |
| ADSVKGRFTI SRDNSKNTLY LQMNSLRAED TAVYYCAKDR AYGDYVGWNG FDYWGQGTLV | 120 |
| TVSS | 124 |
| LC for Fab M283-D05 | |
| (SEQ ID NO: 310) | |
| QDIQMTQSPG TLSLSPGETA TLSCRASQSL GRSDLAWYQQ LPGQAPRLLI FGVSNRATGI | 60 |
| PARFSGSGSG TDFTLTISSL EPEDFAIYYC QQRSNWPVTF GPGTKVDFR | 109 |
| HC for Fab M283-D05 | |
| (SEQ ID NO: 311) | |
| EVQLLESGGG LVQPGGSLRL SCAASGFTFS QYPMWWVRQA PGKGLEWVSY IVPSGGRTYY | 60 |
| ADSVKGRFTI SRDNSKNTLY LQMNSLRAED TAVYYCAKDR AYGDYVGWNG FDYWGQGTLV | 120 |
| TVSS | 124 |
| LC for Fab M287-C05 | |
| (SEQ ID NO: 312) | |
| QDIQMTQSPG TLSLSPGETA TLSCRASQSV SLYLAWYQQK PGQAPRLLIY GASSRATGIP | 60 |
| DRFSGSGSGT DFTLTISRLE PEDFAVYYCQ QRGSWPITFG QGTRLEIK | 108 |
| HC for Fab M287-C05 | |
| (SEQ ID NO: 313) | |
| EVQLLESGGG LVQPGGSLRL SCAASGFTFS QYPMWWVRQA PGKGLEWVSY IVPSGGRTYY | 60 |
| ADSVKGRFTI SRDNSKNTLY LQMNSLRAED TAVYYCAKDR AYGDYVGWNG FDYWGQGTLV | 120 |
| TVSS | 124 |
| LC for Fab M294-B11 | |
| (SEQ ID NO: 314) | |
| QDIQMTQSPG TLSVSPGERA TLSCRASQDV NRYLAWYQQK PGQPPRLLIY GASTRATGIP | 60 |
| ARFSGSGSGT DFTLTISSLE PEDFAVYYCQ QRSNWPITFG QGTRLEIK | 108 |
| HC for Fab M294-B11 | |
| (SEQ ID NO: 315) | |
| EVQLLESGGG LVQPGGSLRL SCAASGFTFS QYPMWWVRQA PGKGLEWVSY IVPSGGRTYY | 60 |
| ADSVKGRFTI SRDNSKNTLY LQMNSLRAED TAVYYCAKDR AYGDYVGWNG FDYWGQGTLV | 120 |
| TVSS | 124 |
| LC for Fab M282-G10 | |
| (SEQ ID NO: 316) | |
| QDIQMTQSPG TLSVSPGERA TLSCRASQSL NSDLAWYQQK PGQAPRLLIY GASTRATGVP | 60 |
| DRFTGSGSGT DFTLTISSLQ SEDLAVYYCQ QRRNWPITFG QGTRLEIK | 108 |
| HC for Fab M282-G10 | |
| (SEQ ID NO: 317) | |
| EVQLLESGGG LVQPGGSLRL SCAASGFTFS QYPMWWVRQA PGKGLEWVSY IVPSGGRTYY | 60 |
| ADSVKGRFTI SRDNSKNTLY LQMNSLRAED TAVYYCAKDR AYGDYVGWNG FDYWGQGTLV | 120 |
| TVSS | 124 |
| LC for Fab M278-E08 | |
| (SEQ ID NO: 318) | |
| QDIQMTQSPG TLSVSPGERA TLSCRASQSV GSDLAWYQQK PGQAPRLLIY GASTRAIGIP | 60 |
| ARFSGSGSGT DFTLTISSLE PEDFAVYFCQ QRGNWPITFG QGTRLEIK | 108 |
| HC for Fab M278-E08 | |
| (SEQ ID NO: 319) | |
| EVQLLESGGG LVQPGGSLRL SCAASGFTFS QYPMWWVRQA PGKGLEWVSY IVPSGGRTYY | 60 |
| ADSVKGRFTI SRDNSKNTLY LQMNSLRAED TAVYYCAKDR AYGDYVGWNG FDYWGQGTLV | 120 |
| TVSS | 124 |
| LC for Fab M281-H01 | |
| (SEQ ID NO: 320) | |
| QDIQMTQSPG TLSVSPGERA TLSCRASQSV SSNLAWYQQK PGQAPRLLIY GASTRATGIP | 60 |
| ARFSGSGSGT DFTLTISSLE PEDFAVYFCQ QRGFWPITFG QGTRLEIK | 108 |
| HC for Fab M281-H01 | |
| (SEQ ID NO: 321) | |
| EVQLLESGGG LVQPGGSLRL SCAASGFTFS QYPMWWVRQA PGKGLEWVSY IVPSGGRTYY | 60 |
| ADSVKGRFTI SRDNSKNTLY LQMNSLRAED TAVYYCAKDR AYGDYVGWNG FDYWGQGTLV | 120 |
| TVSS | 124 |
| LC for Fab M287-C07 | |
| (SEQ ID NO: 324) | |
| QDIQMTQSPG TMSLSPGEGA TLSCRASQTV SSRLLAWYQK KPAQAPRLLM YAASIRATGI | 60 |
| PDRFSGSGSG TDFTLTISRL EPEDFAVYFC QQRRSWPPTF GQGTKVEIK | 109 |
| HC for Fab M287-C07 | |
| (SEQ ID NO: 325) | |
| EVQLLESGGG LVQPGGSLRL SCAASGFTFS QYPMWWVRQA PGKGLEWVSY IVPSGGRTYY | 60 |
| ADSVKGRFTI SRDNSKNTLY LQMNSLRAED TAVYYCAKDR AYGDYVGWNG FDYWGQGTLV | 120 |
| TVSS | 124 |
| LC for Fab M293-E03 | |
| (SEQ ID NO: 326) | |
| QDIQMTQSPS FLSASLGDRV TITCRATQGI GTFLAWYQQK AGRAPKLLIY GASTLQSGVP | 60 |
| SRFSGSGSGT DFTLTISSLE PEDFAVYFCQ QRGNWPITFG QGTRLEIK | 108 |
| HC for Fab M293-E03 | |
| (SEQ ID NO: 327) | |
| EVQLLESGGG LVQPGGSLRL SCAASGFTFS QYPMWWVRQA PGKGLEWVSY IVPSGGRTYY | 60 |
| ADSVKGRFTI SRDNSKNTLY LQMNSLRAED TAVYYCAKDR AYGDYVGWNG FDYWGQGTLV | 120 |
| TVSS | 124 |
| LC for Fab M286-B08 | |
| (SEQ ID NO: 328) | |
| QDIQMTQSPS FLSASLGDRV TITCRATQGI GTFLAWYQQK AGRAPKLLIY GASTLQSGVP | 60 |
| SRFSGSGSGT EFTLTISSLQ PEDFATYYCQ QRGNWPITFG QGTRLEIK | 108 |
| HC for Fab M286-B08 | |
| (SEQ ID NO: 329) | |
| EVQLLESGGG LVQPGGSLRL SCAASGFTFS QYPMWWVRQA PGKGLEWVSY IVPSGGRTYY | 60 |
| ADSVKGRFTI SRDNSKNTLY LQMNSLRAED TAVYYCAKDR AYGDYVGWNG FDYWGQGTLV | 120 |
| TVSS | 124 |
| LC for Fab M282-D10 | |
| (SEQ ID NO: 330) | |
| QDIQMTQSPS FLSASVGDRV TITCRASQDI SSYLAWYQQK PGKAPKLLIY GASTLQSGVP | 60 |
| SRFSGSGSGT EFTLTISSLQ PEDFAVYYCQ QRGNWPITFG QGTRLEIK | 108 |
| HC for Fab M282-D10 | |
| (SEQ ID NO: 331) | |
| EVQLLESGGG LVQPGGSLRL SCAASGFTFS QYPMWWVRQA PGKGLEWVSY IVPSGGRTYY | 60 |
| ADSVKGRFTI SRDNSKNTLY LQMNSLRAED TAVYYCAKDR AYGDYVGWNG FDYWGQGTLV | 120 |
| TVSS | 124 |
| LC for Fab M283-C03 | |
| (SEQ ID NO: 332) | |
| QDIQMTQSPS FLSASVGDRV TITCRASQGI SSYLAWYQQK PGKAPKLLIY AASTLQSGVP | 60 |
| SRFSGSGSGT EFTLTISSLQ PEDFATYYCQ QRSNWPPSFG PGTKVDIK | 108 |
| HC for Fab M283-C03 | |
| (SEQ ID NO: 333) | |
| EVQLLESGGG LVQPGGSLRL SCAASGFTFS QYPMWWVRQA PGKGLEWVSY IVPSGGRTYY | 60 |
| ADSVKGRFTI SRDNSKNTLY LQMNSLRAED TAVYYCAKDR AYGDYVGWNG FDYWGQGTLV | 120 |
| TVSS | 124 |
| LC for Fab M287-G06 | |
| (SEQ ID NO: 334) | |
| QDIQMTQSPS SLSASVGDRV TITCRASQGI RNDVGWYQQK PGKAPKLLIY APSNLQSGVP | 60 |
| PRFSGSASGT DFTLTISSLQ PEDFATYYCL QDFDFPWTFG QGTKVEIK | 108 |
| HC for Fab M287-G06 | |
| (SEQ ID NO: 335) | |
| EVQLLESGGG LVQPGGSLRL SCAASGFTFS QYPMWWVRQA PGKGLEWVSY IVPSGGRTYY | 60 |
| ADSVKGRFTI SRDNSKNTLY LQMNSLRAED TAVYYCAKDR AYGDYVGWNG FDYWGQGTLV | 120 |
| TVSS | 124 |
| LC for Fab M281-C02 | |
| (SEQ ID NO: 336) | |
| QDIQMTQSPS SLSLSPGERA TLSCRASQSI SSFLAWYQQK PGQAPRLLIY DASYRATGIP | 60 |
| ARFSGSGSGT DFTLTISSLE PEDYAVYYCQ QRGNWPITFG QGTRLEIK | 108 |
| HC for Fab M281-C02 | |
| (SEQ ID NO: 337) | |
| EVQLLESGGG LVQPGGSLRL SCAASGFTFS QYPMWWVRQA PGKGLEWVSY IVPSGGRTYY | 60 |
| ADSVKGRFTI SRDNSKNTLY LQMNSLRAED TAVYYCAKDR AYGDYVGWNG FDYWGQGTLV | 120 |
| TVSS | 124 |
| LC for Fab M282-A06 | |
| (SEQ ID NO: 338) | |
| QDIQMTQSPS SLSVSPGERA TLSCRASQSV NSDLAWYQQR PGQAPRLLIY AASTRATGVP | 60 |
| ARFSGTGSGT EFTLTISSLE PEDFAVYYCQ QRRKWPVTFG GGTKVEIK | 108 |
| HC for Fab M282-A06 | |
| (SEQ ID NO: 339) | |
| EVQLLESGGG LVQPGGSLRL SCAASGFTFS QYPMWWVRQA PGKGLEWVSY IVPSGGRTYY | 60 |
| ADSVKGRFTI SRDNSKNTLY LQMNSLRAED TAVYYCAKDR AYGDYVGWNG FDYWGQGTLV | 120 |
| TVSS | 124 |
| LC for Fab M280-C07 | |
| (SEQ ID NO: 340) | |
| QDIQMTQSPS SVSASVGDRV TITCRASQGI STWLAWYQQK PGQAPRLLIY GASNRATGIP | 60 |
| DRFSGSGSGT DFTLTISRLE PEDFAVYFCQ QRGNWPITFG QGTRLEIK | 108 |
| HC for Fab M280-C07 | |
| (SEQ ID NO: 341) | |
| EVQLLESGGG LVQPGGSLRL SCAASGFTFS QYPMWWVRQA PGKGLEWVSY IVPSGGRTYY | 60 |
| ADSVKGRFTI SRDNSKNTLY LQMNSLRAED TAVYYCAKDR AYGDYVGWNG FDYWGQGTLV | 120 |
| TVSS | 124 |
| LC for Fab M287-G10 | |
| (SEQ ID NO: 342) | |
| QDIQMTQSPS TLSASVGDRV NITCRASQTI SSWLAWYQQK PGKAPKLLIY KASSLQSGVP | 60 |
| SRFSGSGSGT DFTLTISSLQ PEDFATYYCQ QYSSWYTFGQ GTKLEIK | 107 |
| HC for Fab M287-G10 | |
| (SEQ ID NO: 343) | |
| EVQLLESGGG LVQPGGSLRL SCAASGFTFS QYPMWWVRQA PGKGLEWVSY IVPSGGRTYY | 60 |
| ADSVKGRFTI SRDNSKNTLY LQMNSLRAED TAVYYCAKDR AYGDYVGWNG FDYWGQGTLV | 120 |
| TVSS | 124 |
| LC for Fab M278-D11 | |
| (SEQ ID NO: 344) | |
| QDIQMTQSPS TLSLSPGERA TLSCRASQNV HTYLAWYQQK PGQAPRLLIS EASNRATGVP | 60 |
| ARFTGSGSGI DFSLSISSLE PEDFAIYYCQ QRGGWPITFG GGTKVEIK | 108 |
| HC for Fab M278-D11 | |
| (SEQ ID NO: 345) | |
| EVQLLESGGG LVQPGGSLRL SCAASGFTFS QYPMWWVRQA PGKGLEWVSY IVPSGGRTYY | 60 |
| ADSVKGRFTI SRDNSKNTLY LQMNSLRAED TAVYYCAKDR AYGDYVGWNG FDYWGQGTLV | 120 |
| TVSS | 124 |
| LC for Fab M287-F02 | |
| (SEQ ID NO: 346) | |
| QDIQMTQSPV TLSVSPGERA TLSCRASQNI GSDLAWYQQQ PGQAPRLLIY RASFRATGIP | 60 |
| ARFSGSGSGT DFTLTISSLE PEDFAVYYCQ QRGFWPLTFG AGTKVEIK | 108 |
| HC for Fab M287-F02 | |
| (SEQ ID NO: 347) | |
| EVQLLESGGG LVQPGGSLRL SCAASGFTFS QYPMWWVRQA PGKGLEWVSY IVPSGGRTYY | 60 |
| ADSVKGRFTI SRDNSKNTLY LQMNSLRAED TAVYYCAKDR AYGDYVGWNG FDYWGQGTLV | 120 |
| TVSS | 124 |
| LC for Fab M269-C02 | |
| (SEQ ID NO: 348) | |
| QDIQMTQSPA TLSLSPGERA TLSCRASQSI SSFLAWYQQK PGQAPRLLIY DASYRATGIP | 60 |
| ARFSGSGSGT DFTLTISSLE PEDYAVYYCQ QRGNWPITFG QGTRLEIK | 108 |
| HC for Fab M269-C02 | |
| (SEQ ID NO: 349) | |
| EVQLLESGGG LVQPGASLRL SCAASGFTFS TYPMWWVRQA PGKGLEWVSY ISSSGGGTYY | 60 |
| ADSVKGRFTI SRDNSKNTLY LQMNSLRAED TAVYYCAKDR AYGDYVGWNG FDYWGQGTLV | 120 |
| TVSS | 124 |
| LC for Fab M277-C02 | |
| (SEQ ID NO: 350) | |
| QDIQMTQSPA TLSLSPGERA TLSCRASQSI SSFLAWYQQK PGQAPRLLIY DASYRATGIP | 60 |
| ARFSGSGSGT DFTLTISSLE PEDYAVYYCQ QRGNWPITFG QGTRLEIK | 108 |
| HC for Fab M277-C02 | |
| (SEQ ID NO: 351) | |
| EVQLLESGGG LVQPGGSLRL SCAASGFTFS AYDMIWVRQA PGKGLEWVSY IVPSGGFTDY | 60 |
| ADSVKGRFTI SRDNSKNTLY LQMNSLRAED TAVYYCAKDR AYGDYVGWNG FDYWGQGTLV | 120 |
| TVSS | 124 |
| LC for Fab M272-H08 | |
| (SEQ ID NO: 352) | |
| QDIQMTQSPA TLSLSPGERA TLSCRASQSI SSFLAWYQQK PGQAPRLLIY DASYRATGIP | 60 |
| ARFSGSGSGT DFTLTISSLE PEDYAVYYCQ QRGNWPITFG QGTRLEIK | 108 |
| HC for Fab M272-H08 | |
| (SEQ ID NO: 353) | |
| EVQLLESGGG LVQPGGSLRL SCAASGFTFS AYDMWWVRQA PGKGLEWVSV IYPSGGTTFY | 60 |
| ADSVKGRFTI SRDNSKNTLY LQMNSLRAED TAVYYCAKDR AYGDYVGWNG FDYWGQGTLV | 120 |
| TVSS | 124 |
| LC for Fab M271-D10 | |
| (SEQ ID NO: 354) | |
| QDIQMTQSPA TLSLSPGERA TLSCRASQSI SSFLAWYQQK PGQAPRLLIY DASYRATGIP | 60 |
| ARFSGSGSGT DFTLTISSLE PEDYAVYYCQ QRGNWPITFG QGTRLEIK | 108 |
| HC for Fab M271-D10 | |
| (SEQ ID NO: 355) | |
| EVQLLESGGG LVQPGGSLRL SCAASGFTFS AYDMWWVRQA PGKGLEWVSV IYSSGGMTLY | 60 |
| ADSVKGRFTI SRDNSKNTLY LQMNSLRAED TAVYYCAKDR AYGDYVGWNG FDYWGQGTLV | 120 |
| TVSS | 124 |
| LC for Fab M271-E12 | |
| (SEQ ID NO: 356) | |
| QDIQMTQSPA TLSLSPGERA TLSCRASQSI SSFLAWYQQK PGQAPRLLIY DASYRATGIP | 60 |
| ARFSGSGSGT DFTLTISSLE PEDYAVYYCQ QRGNWPITFG QGTRLEIK | 108 |
| HC for Fab M271-E12 | |
| (SEQ ID NO: 357) | |
| EVQLLESGGG LVQPGGSLRL SCAASGFTFS AYDMWWVRQA PGKGLEWVSY ISSSGGFTDY | 60 |
| ADSVKGRFTI SRDNSKNTLY LQMNSLRAED TAVYYCAKDR AYGDYVGWNG FDYWGQGTLV | 120 |
| TVSS | 124 |
| LC for Fab M269-C06 | |
| (SEQ ID NO: 358) | |
| QDIQMTQSPA TLSLSPGERA TLSCRASQSI SSFLAWYQQK PGQAPRLLIY DASYRATGIP | 60 |
| ARFSGSGSGT DFTLTISSLE PEDYAVYYCQ QRGNWPITFG QGTRLEIK | 108 |
| HC for Fab M269-C06 | |
| (SEQ ID NO: 359) | |
| EVQLLESGGG LVQPGGSLRL SCAASGFTFS AYEMWWVRQA PGKGLEWVSS IYPSGGYTDY | 60 |
| ADSVKGRFTI SRDNSKNTLY LQMNSLRAED TAVYYCAKDR AYGDYVGWNG FDYWGQGTLV | 120 |
| TVSS | 124 |
| LC for Fab M271-G01 | |
| (SEQ ID NO: 360) | |
| QDIQMTQSPA TLSLSPGERA TLSCRASQSI SSFLAWYQQK PGQAPRLLIY DASYRATGIP | 60 |
| ARFSGSGSGT DFTLTISSLE PEDYAVYYCQ QRGNWPITFG QGTRLEIK | 108 |
| HC for Fab M271-G01 | |
| (SEQ ID NO: 361) | |
| EVQLLESGGG LVQPGGSLRL SCAASGFTFS AYEMWWVRQA PGKGLEWVSV IYPSGGGTFY | 60 |
| ADSVKGRFTI SRDNSKNTLY LQMNSLRAED TAVYYCAKDR AYGDYVGWNG FDYWGQGTLV | 120 |
| TVSS | 124 |
| LC for Fab M270-F03 | |
| (SEQ ID NO: 362) | |
| QDIQMTQSPA TLSLSPGERA TLSCRASQSI SSFLAWYQQK PGQAPRLLIY DASYRATGIP | 60 |
| ARFSGSGSGT DFTLTISSLE PEDYAVYYCQ QRGNWPITFG QGTRLEIK | 108 |
| HC for Fab M270-F03 | |
| (SEQ ID NO: 363) | |
| EVQLLESGGG LVQPGGSLRL SCAASGFTFS AYMMWWVRQA PGKGLEWVSA ISPSGGYTGY | 60 |
| ADSVKGRFTI SRDNSKNTLY LQMNSLRAED TAVYYCAKDR AYGDYVGWNG FDYWGQGTLV | 120 |
| TVSS | 124 |
| LC for Fab M270-G04 | |
| (SEQ ID NO: 364) | |
| QDIQMTQSPA TLSLSPGERA TLSCRASQSI SSFLAWYQQK PGQAPRLLIY DASYRATGIP | 60 |
| ARFSGSGSGT DFTLTISSLE PEDYAVYYCQ QRGNWPITFG QGTRLEIK | 108 |
| HC for Fab M270-G04 | |
| (SEQ ID NO: 365) | |
| EVQLLESGGG LVQPGGSLRL SCAASGFTFS AYNMIWVRQA PGKGLEWVSY IVPSGGFTGY | 60 |
| ADSVKGRFTI SRDNSKNTLY LQMNSLRAED TAVYYCAKDR AYGDYVGWNG FDYWGQGTLV | 120 |
| TVSS | 124 |
| LC for Fab M268-E01 | |
| (SEQ ID NO: 366) | |
| QDIQMTQSPA TLSLSPGERA TLSCRASQSI SSFLAWYQQK PGQAPRLLIY DASYRATGIP | 60 |
| ARFSGSGSGT DFTLTISSLE PEDYAVYYCQ QRGNWPITFG QGTRLEIK | 108 |
| HC for Fab M268-E01 | |
| (SEQ ID NO: 367) | |
| EVQLLESGGG LVQPGGSLRL SCAASGFTFS AYPMIWVRQA PGKGLEWVSY IVPSGGATFY | 60 |
| ADSVKGRFTI SRDNSKNTLY LQMNSLRAED TAVYYCAKDR AYGDYVGWNG FDYWGQGTLV | 120 |
| TVSS | 124 |
| LC for Fab M269-E07 | |
| (SEQ ID NO: 368) | |
| QDIQMTQSPA TLSLSPGERA TLSCRASQSI SSFLAWYQQK PGQAPRLLIY DASYRATGIP | 60 |
| ARFSGSGSGT DFTLTISSLE PEDYAVYYCQ QRGNWPITFG QGTRLEIK | 108 |
| HC for Fab M269-E07 | |
| (SEQ ID NO: 369) | |
| EVQLLESGGG LVQPGGSLRL SCAASGFTFS AYPMMWVRQA PGKGLEWVSY IYPSGGGTFY | 60 |
| ADSVKGRFTI SRDNSKNTLY LQMNSLRAED TAVYYCAKDR AYGDYVGWNG FDYWGQGTLV | 120 |
| TVSS | 124 |
| LC for Fab M299-C10 | |
| (SEQ ID NO: 370) | |
| QDIQMTQSPA TLSLSPGERA TLSCRASQSI SSFLAWYQQK PGQAPRLLIY DASYRATGIP | 60 |
| ARFSGSGSGT DFTLTISSLE PEDYAVYYCQ QRGNWPITFG QGTRLEIK | 108 |
| HC for Fab M299-C10 | |
| (SEQ ID NO: 371) | |
| EVQLLESGGG LVQPGGSLRL SCAASGFTFS AYPMWWVRQA PGKGLEWVSY IVPSGGMTYY | 60 |
| ADSVKGRFTI SRDNSKNTLY LQMNSLRAED TAVYYCAKDR AYGDYVGWNG FDYWGQGTLV | 120 |
| TVSS | 124 |
| LC for Fab M274-D05 | |
| (SEQ ID NO: 372) | |
| QDIQMTQSPA TLSLSPGERA TLSCRASQSI SSFLAWYQQK PGQAPRLLIY DASYRATGIP | 60 |
| ARFSGSGSGT DFTLTISSLE PEDYAVYYCQ QRGNWPITFG QGTRLEIK | 108 |
| HC for Fab M274-D05 | |
| (SEQ ID NO: 373) | |
| EVQLLESGGG LVQPGGSLRL SCAASGFTFS AYPMWWVRQA PGKGLEWVSY IYPSGGATFY | 60 |
| ADSVKGRFTI SRDNSKNTLY LQMNSLRAED TAVYYCAKDR AYGDYVGWNG FDYWGQGTLV | 120 |
| TVSS | 124 |
| LC for Fab M300-F10 | |
| (SEQ ID NO: 374) | |
| QDIQMTQSPA TLSLSPGERA TLSCRASQSI SSFLAWYQQK PGQAPRLLIY DASYRATGIP | 60 |
| ARFSGSGSGT DFTLTISSLE PEDYAVYYCQ QRGNWPITFG QGTRLEIK | 108 |
| HC for Fab M300-F10 | |
| (SEQ ID NO: 375) | |
| EVQLLESGGG LVQPGGSLRL SCAASGFTFS DYAMWWVRQA PGKGLEWVSS IYPSGGATFY | 60 |
| ADSVKGRFTI SRDNSKNTLY LQMNSLRAED TAVYYCAKDR AYGDYVGWNG FDYWGQGTLV | 120 |
| TVSS | 124 |
| LC for Fab M269-D11 | |
| (SEQ ID NO: 376) | |
| QDIQMTQSPA TLSLSPGERA TLSCRASQSI SSFLAWYQQK PGQAPRLLIY DASYRATGIP | 60 |
| ARFSGSGSGT DFTLTISSLE PEDYAVYYCQ QRGNWPITFG QGTRLEIK | 108 |
| HC for Fab M269-D11 | |
| (SEQ ID NO: 377) | |
| EVQLLESGGG LVQPGGSLRL SCAASGFTFS DYAMWWVRQA PGKGLEWVSW ISPSGGGTLY | 60 |
| ADSVKGRFTI SRDNSKNTLY LQMNSLRAED TAVYYCAKDR AYGDYVGWNG FDYWGQGTLV | 120 |
| TVSS | 124 |
| LC for Fab M271-D08 | |
| (SEQ ID NO: 378) | |
| QDIQMTQSPA TLSLSPGERA TLSCRASQSI SSFLAWYQQK PGQAPRLLIY DASYRATGIP | 60 |
| ARFSGSGSGT DFTLTISSLE PEDYAVYYCQ QRGNWPITFG QGTRLEIK | 108 |
| HC for Fab M271-D08 | |
| (SEQ ID NO: 379) | |
| EVQLLESGGG LVQPGGSLRL SCAASGFTFS DYDMFWVRQA PGKGLEWVSG IVSSGGYTGY | 60 |
| ADSVKGRFTI SRDNSKNTLY LQMNSLRAED TAVYYCAKDR AYGDYVGWNG FDYWGQGTLV | 120 |
| TVSS | 124 |
| LC for Fab M268-A12 | |
| (SEQ ID NO: 380) | |
| QDIQMTQSPA TLSLSPGERA TLSCRASQSI SSFLAWYQQK PGQAPRLLIY DASYRATGIP | 60 |
| ARFSGSGSGT DFTLTISSLE PEDYAVYYCQ QRGNWPITFG QGTRLEIK | 108 |
| HC for Fab M268-A12 | |
| (SEQ ID NO: 381) | |
| EVQLLESGGG LVQPGGSLRL SCAASGFTFS DYDMWWVRQA PGKGLEWVSV ISPSGGYTGY | 60 |
| ADSVKGRFTI SRDNSKNTLY LQMNSLRAED TAVYYCAKDR AYGDYVGWNG FDYWGQGTLV | 120 |
| TVSS | 124 |
| LC for Fab M277-A06 | |
| (SEQ ID NO: 382) | |
| QDIQMTQSPA TLSLSPGERA TLSCRASQSI SSFLAWYQQK PGQAPRLLIY DASYRATGIP | 60 |
| ARFSGSGSGT DFTLTISSLE PEDYAVYYCQ QRGNWPITFG QGTRLEIK | 108 |
| HC for Fab M277-A06 | |
| (SEQ ID NO: 383) | |
| EVQLLESGGG LVQPGGSLRL SCAASGFTFS DYDMWWVRQA PGKGLEWVSV IYPSGGFTGY | 60 |
| ADSVKGRFTI SRDNSKNTLY LQMNSLRAED TAVYYCAKDR AYGDYVGWNG FDYWGQGTLV | 120 |
| TVSS | 124 |
| LC for Fab M272-E06 | |
| (SEQ ID NO: 384) | |
| QDIQMTQSPA TLSLSPGERA TLSCRASQSI SSFLAWYQQK PGQAPRLLIY DASYRATGIP | 60 |
| ARFSGSGSGT DFTLTISSLE PEDYAVYYCQ QRGNWPITFG QGTRLEIK | 108 |
| HC for Fab M272-E06 | |
| (SEQ ID NO: 385) | |
| EVQLLESGGG LVQPGGSLRL SCAASGFTFS DYDMWWVRQA PGKGLEWVSV IYSGGSTYYA | 60 |
| DSVKGRFTIS RDNSKNTLYL QMNSLRAEDT AVYYCAKDRA YGDYVGWNGF DYWGQGTLVT | 120 |
| VSS | 123 |
| LC for Fab M271-A10 | |
| (SEQ ID NO: 386) | |
| QDIQMTQSPA TLSLSPGERA TLSCRASQSI SSFLAWYQQK PGQAPRLLIY DASYRATGIP | 60 |
| ARFSGSGSGT DFTLTISSLE PEDYAVYYCQ QRGNWPITFG QGTRLEIK | 108 |
| HC for Fab M271-A10 | |
| (SEQ ID NO: 387) | |
| EVQLLESGGG LVQPGGSLRL SCAASGFTFS DYDMWWVRQA PGKGLEWVSV IYSSGGFTSY | 60 |
| ADSVKGRFTI SRDNSKNTLY LQMNSLRAED TAVYYCAKDR AYGDYVGWNG FDYWGQGTLV | 120 |
| TVSS | 124 |
| LC for Fab M275-E06 | |
| (SEQ ID NO: 388) | |
| QDIQMTQSPA TLSLSPGERA TLSCRASQSI SSFLAWYQQK PGQAPRLLIY DASYRATGIP | 60 |
| ARFSGSGSGT DFTLTISSLE PEDYAVYYCQ QRGNWPITFG QGTRLEIK | 108 |
| HC for Fab M275-E06 | |
| (SEQ ID NO: 389) | |
| EVQLLESGGG LVQPGGSLRL SCAASGFTFS DYDMWWVRQA PGKGLEWVSV IYSSGGMTYY | 60 |
| ADSVKGRFTI SRDNSKNTLY LQMNSLRAED TAVYYCAKDR AYGDYVGWNG FDYWGQGTLV | 120 |
| TVSS | 124 |
| LC for Fab M277-E12 | |
| (SEQ ID NO: 390) | |
| QDIQMTQSPA TLSLSPGERA TLSCRASQSI SSFLAWYQQK PGQAPRLLIY DASYRATGIP | 60 |
| ARFSGSGSGT DFTLTISSLE PEDYAVYYCQ QRGNWPITFG QGTRLEIK | 108 |
| HC for Fab M277-E12 | |
| (SEQ ID NO: 391) | |
| EVQLLESGGG LVQPGGSLRL SCAASGFTFS DYMMWWVRQA PGKGLEWVSS ISPSGGFTDY | 60 |
| ADSVKGRFTI SRDNSKNTLY LQMNSLRAED TAVYYCAKDR AYGDYVGWNG FDYWGQGTLV | 120 |
| TVSS | 124 |
| LC for Fab M269-B06 | |
| (SEQ ID NO: 392) | |
| QDIQMTQSPA TLSLSPGERA TLSCRASQSI SSFLAWYQQK PGQAPRLLIY DASYRATGIP | 60 |
| ARFSGSGSGT DFTLTISSLE PEDYAVYYCQ QRGNWPITFG QGTRLEIK | 108 |
| HC for Fab M269-B06 | |
| (SEQ ID NO: 393) | |
| EVQLLESGGG LVQPGGSLRL SCAASGFTFS DYNMWWVRQA PGKGLEWVSV IYPSGGWTMY | 60 |
| ADSVKGRFTI SRDNSKNTLY LQMNSLRAED TAVYYCAKDR AYGDYVGWNG FDYWGQGTLV | 120 |
| TVSS | 124 |
| LC for Fab M271-B04 | |
| (SEQ ID NO: 394) | |
| QDIQMTQSPA TLSLSPGERA TLSCRASQSI SSFLAWYQQK PGQAPRLLIY DASYRATGIP | 60 |
| ARFSGSGSGT DFTLTISSLE PEDYAVYYCQ QRGNWPITFG QGTRLEIK | 108 |
| HC for Fab M271-B04 | |
| (SEQ ID NO: 395) | |
| EVQLLESGGG LVQPGGSLRL SCAASGFTFS DYPMFWVRQA PGKGLEWVSY IVPSGGWTDY | 60 |
| ADSVKGRFTI SRDNSKNTLY LQMNSLRAED TAVYYCAKDR AYGDYVGWNG FDYWGQGTLV | 120 |
| TVSS | 124 |
| LC for Fab M306-C02 | |
| (SEQ ID NO: 396) | |
| QDIQMTQSPA TLSLSPGERA TLSCRASQSI SSFLAWYQQK PGQAPRLLIY DASYRATGIP | 60 |
| ARFSGSGSGT DFTLTISSLE PEDYAVYYCQ QRGNWPITFG QGTRLEIK | 108 |
| HC for Fab M306-C02 | |
| (SEQ ID NO: 397) | |
| EVQLLESGGG LVQPGGSLRL SCAASGFTFS DYPMFWVRQA PGKGLEWVSY IVPSGGWTSY | 60 |
| ADSVKGRFTI SRDNSKNTLY LQMNSLRAED TAVYYCAKDR AYGDYVGWNG FDYWGQGTLV | 120 |
| TVSS | 124 |
| LC for Fab M277-G06 | |
| (SEQ ID NO: 398) | |
| QDIQMTQSPA TLSLSPGERA TLSCRASQSI SSFLAWYQQK PGQAPRLLIY DASYRATGIP | 60 |
| ARFSGSGSGT DFTLTISSLE PEDYAVYYCQ QRGNWPITFG QGTRLEIK | 108 |
| HC for Fab M277-G06 | |
| (SEQ ID NO: 399) | |
| EVQLLESGGG LVQPGGSLRL SCAASGFTFS DYPMIWVRQA PGKGLEWVSY ISPSGGYTDY | 60 |
| ADSVKGRFTI SRDNSKNTLY LQMNSLRAED TAVYYCAKDR AYGDYVGWNG FDYWGQGTLV | 120 |
| TVSS | 124 |
| LC for Fab M277-G04 | |
| (SEQ ID NO: 400) | |
| QDIQMTQSPA TLSLSPGERA TLSCRASQSI SSFLAWYQQK PGQAPRLLIY DASYRATGIP | 60 |
| ARFSGSGSGT DFTLTISSLE PEDYAVYYCQ QRGNWPITFG QGTRLEIK | 108 |
| HC for Fab M277-G04 | |
| (SEQ ID NO: 401) | |
| EVQLLESGGG LVQPGGSLRL SCAASGFTFS DYPMIWVRQA PGKGLEWVSY IVPSGGWTDY | 60 |
| ADSVKGRFTI SRDNSKNTLY LQMNSLRAED TAVYYCAKDR AYGDYVGWNG FDYWGQGTLV | 120 |
| TVSS | 124 |
| LC for Fab M298-C05 | |
| (SEQ ID NO: 402) | |
| QDIQMTQSPA TLSLSPGERA TLSCRASQSI SSFLAWYQQK PGQAPRLLIY DASYRATGIP | 60 |
| ARFSGSGSGT DFTLTISSLE PEDYAVYYCQ QRGNWPITFG QGTRLEIK | 108 |
| HC for Fab M298-C05 | |
| (SEQ ID NO: 403) | |
| EVQLLESGGG LVQPGGSLRL SCAASGFTFS DYPMIWVRQA PGKGLEWVSY IYPSGGGTYY | 60 |
| ADSVKGRFTI SRDNSKNTLY LQMNSLRAED TAVYYCAKDR AYGDYVGWNG FDYWGQGTLV | 120 |
| TVSS | 124 |
| LC for Fab M268-C12 | |
| (SEQ ID NO: 404) | |
| QDIQMTQSPA TLSLSPGERA TLSCRASQSI SSFLAWYQQK PGQAPRLLIY DASYRATGIP | 60 |
| ARFSGSGSGT DFTLTISSLE PEDYAVYYCQ QRGNWPITFG QGTRLEIK | 108 |
| HC for Fab M268-C12 | |
| (SEQ ID NO: 405) | |
| EVQLLESGGG LVQPGGSLRL SCAASGFTFS DYPMWWVRQA PGKGLEWVSY ISSSGGWTSY | 60 |
| ADSVKGRFTI SRDNSKNTLY LQMNSLRAED TAVYYCAKDR AYGDYVGWNG FDYWGQGTLV | 120 |
| TVSS | 124 |
| LC for Fab M269-F03 | |
| (SEQ ID NO: 406) | |
| QDIQMTQSPA TLSLSPGERA TLSCRASQSI SSFLAWYQQK PGQAPRLLIY DASYRATGIP | 60 |
| ARFSGSGSGT DFTLTISSLE PEDYAVYYCQ QRGNWPITFG QGTRLEIK | 108 |
| HC for Fab M269-F03 | |
| (SEQ ID NO: 407) | |
| EVQLLESGGG LVQPGGSLRL SCAASGFTFS DYPMWWVRQA PGKGLEWVSY IYPSGGATYY | 60 |
| ADSVKGRFTI SRDNSKNTLY LQMNSLRAED TAVYYCAKDR AYGDYVGWNG FDYWGQGTLV | 120 |
| TVSS | 124 |
| LC for Fab M271-A08 | |
| (SEQ ID NO: 408) | |
| QDIQMTQSPA TLSLSPGERA TLSCRASQSI SSFLAWYQQK PGQAPRLLIY DASYRATGIP | 60 |
| ARFSGSGSGT DFTLTISSLE PEDYAVYYCQ QRGNWPITFG QGTRLEIK | 108 |
| HC for Fab M271-A08 | |
| (SEQ ID NO: 409) | |
| EVQLLESGGG LVQPGGSLRL SCAASGFTFS DYQMWWVRQA PGKGLEWVSV IYPSGGATFY | 60 |
| ADSVKGRFTI SRDNSKNTLY LQMNSLRAED TAVYYCAKDR AYGDYVGWNG FDYWGQGTLV | 120 |
| TVSS | 124 |
| LC for Fab M272-D08 | |
| (SEQ ID NO: 410) | |
| QDIQMTQSPA TLSLSPGERA TLSCRASQSI SSFLAWYQQK PGQAPRLLIY DASYRATGIP | 60 |
| ARFSGSGSGT DFTLTISSLE PEDYAVYYCQ QRGNWPITFG QGTRLEIK | 108 |
| HC for Fab M272-D08 | |
| (SEQ ID NO: 411) | |
| EVQLLESGGG LVQPGGSLRL SCAASGFTFS EYDMWWVRQA PGKGLEWVSV IYPSGGPTYY | 60 |
| ADSVKGRFTI SRDNSKNTLY LQMNSLRAED TAVYYCAKDR AYGDYVGWNG FDYWGQGTLV | 120 |
| TVSS | 124 |
| LC for Fab M275-G03 | |
| (SEQ ID NO: 412) | |
| QDIQMTQSPA TLSLSPGERA TLSCRASQSI SSFLAWYQQK PGQAPRLLIY DASYRATGIP | 60 |
| ARFSGSGSGT DFTLTISSLE PEDYAVYYCQ QRGNWPITFG QGTRLEIK | 108 |
| HC for Fab M275-G03 | |
| (SEQ ID NO: 413) | |
| EVQLLESGGG LVQPGGSLRL SCAASGFTFS EYDMWWVRQA PGKGLEWVSV IYSSGGYTGY | 60 |
| ADSVKGRFTI SRDNSKNTLY LQMNSLRAED TAVYYCAKDR AYGDYVGWNG FDYWGQGTLV | 120 |
| TVSS | 124 |
| LC for Fab M271-A11 | |
| (SEQ ID NO: 414) | |
| QDIQMTQSPA TLSLSPGERA TLSCRASQSI SSFLAWYQQK PGQAPRLLIY DASYRATGIP | 60 |
| ARFSGSGSGT DFTLTISSLE PEDYAVYYCQ QRGNWPITFG QGTRLEIK | 108 |
| HC for Fab M271-A11 | |
| (SEQ ID NO: 415) | |
| EVQLLESGGG LVQPGGSLRL SCAASGFTFS EYEMWWVRQA PGKGLEWVSV IYPSGGYTNY | 60 |
| ADSVKGRFTI SRDNSKNTLY LQMNSLRAED TAVYYCAKDR AYGDYVGWNG FDYWGQGTLV | 120 |
| TVSS | 124 |
| LC for Fab M269-G06 | |
| (SEQ ID NO: 416) | |
| QDIQMTQSPA TLSLSPGERA TLSCRASQSI SSFLAWYQQK PGQAPRLLIY DASYRATGIP | 60 |
| ARFSGSGSGT DFTLTISSLE PEDYAVYYCQ QRGNWPITFG QGTRLEIK | 108 |
| HC for Fab M269-G06 | |
| (SEQ ID NO: 417) | |
| EVQLLESGGG LVQPGGSLRL SCAASGFTFS EYNMWWVRQA PGKGLEWVSV IYPSGGPTWY | 60 |
| ADSVKGRFTI SRDNSKNTLY LQMNSLRAED TAVYYCAKDR AYGDYVGWNG FDYWGQGTLV | 120 |
| TVSS | 124 |
| LC for Fab M272-E03 | |
| (SEQ ID NO: 418) | |
| QDIQMTQSPA TLSLSPGERA TLSCRASQSI SSFLAWYQQK PGQAPRLLIY DASYRATGIP | 60 |
| ARFSGSGSGT DFTLTISSLE PEDYAVYYCQ QRGNWPITFG QGTRLEIK | 108 |
| HC for Fab M272-E03 | |
| (SEQ ID NO: 419) | |
| EVQLLESGGG LVQPGGSLRL SCAASGFTFS EYPMFWVRQA PGKGLEWVSY ISPSGGWTSY | 60 |
| ADSVKGRFTI SRDNSKNTLY LQMNSLRAED TAVYYCAKDR AYGDYVGWNG FDYWGQGTLV | 120 |
| TVSS | 124 |
| LC for Fab M276-G10 | |
| (SEQ ID NO: 420) | |
| QDIQMTQSPA TLSLSPGERA TLSCRASQSI SSFLAWYQQK PGQAPRLLIY DASYRATGIP | 60 |
| ARFSGSGSGT DFTLTISSLE PEDYAVYYCQ QRGNWPITFG QGTRLEIK | 108 |
| HC for Fab M276-G10 | |
| (SEQ ID NO: 421) | |
| EVQLLESGGG LVQPGGSLRL SCAASGFTFS EYPMIWVRQA PGKGLEWVSY ISPSGGYTGY | 60 |
| ADSVKGRFTI SRDNSKNTLY LQMNSLRAED TAVYYCAKDR AYGDYVGWNG FDYWGQGTLV | 120 |
| TVSS | 124 |
| LC for Fab M269-H08 | |
| (SEQ ID NO: 422) | |
| QDIQMTQSPA TLSLSPGERA TLSCRASQSI SSFLAWYQQK PGQAPRLLIY DASYRATGIP | 60 |
| ARFSGSGSGT DFTLTISSLE PEDYAVYYCQ QRGNWPITFG QGTRLEIK | 108 |
| HC for Fab M269-H08 | |
| (SEQ ID NO: 423) | |
| EVQLLESGGG LVQPGGSLRL SCAASGFTFS EYPMWWVRQA PGKGLEWVSS IYPSGGATFY | 60 |
| ADSVKGRFTI SRDNSKNTLY LQMNSLRAED TAVYYCAKDR AYGDYVGWNG FDYWGQGTLV | 120 |
| TVSS | 124 |
| LC for Fab M300-A11 | |
| (SEQ ID NO: 424) | |
| QDIQMTQSPA TLSLSPGERA TLSCRASQSI SSFLAWYQQK PGQAPRLLIY DASYRATGIP | 60 |
| ARFSGSGSGT DFTLTISSLE PEDYAVYYCQ QRGNWPITFG QGTRLEIK | 108 |
| HC for Fab M300-A11 | |
| (SEQ ID NO: 425) | |
| EVQLLESGGG LVQPGGSLRL SCAASGFTFS EYWMWWVRQA PGKGLEWVSS ISPSGGGTFY | 60 |
| ADSVKGRFTI SRDNSKNTLY LQMNSLRAED TAVYYCAKDR AYGDYVGWNG FDYWGQGTLV | 120 |
| TVSS | 124 |
| LC for Fab M274-D02 | |
| (SEQ ID NO: 426) | |
| QDIQMTQSPA TLSLSPGERA TLSCRASQSI SSFLAWYQQK PGQAPRLLIY DASYRATGIP | 60 |
| ARFSGSGSGT DFTLTISSLE PEDYAVYYCQ QRGNWPITFG QGTRLEIK | 108 |
| HC for Fab M274-D02 | |
| (SEQ ID NO: 427) | |
| EVQLLESGGG LVQPGGSLRL SCAASGFTFS FYDMFWVRQA PGKGLEWVSV ISSSGGGTFY | 60 |
| ADSVKGRFTI SRDNSKNTLY LQMNSLRAED TAVYYCAKDR AYGDYVGWNG FDYWGQGTLV | 120 |
| TVSS | 124 |
| LC for Fab M269-H01 | |
| (SEQ ID NO: 428) | |
| QDIQMTQSPA TLSLSPGERA TLSCRASQSI SSFLAWYQQK PGQAPRLLIY DASYRATGIP | 60 |
| ARFSGSGSGT DFTLTISSLE PEDYAVYYCQ QRGNWPITFG QGTRLEIK | 108 |
| HC for Fab M269-H01 | |
| (SEQ ID NO: 429) | |
| EVQLLESGGG LVQPGGSLRL SCAASGFTFS FYDMLWVRQA PGKGLEWVSY ISSSGGFTGY | 60 |
| ADSVKGRFTI SRDNSKNTLY LQMNSLRAED TAVYYCAKDR AYGDYVGWNG FDYWGQGTLV | 120 |
| TVSS | 124 |
| LC for Fab M272-D07 | |
| (SEQ ID NO: 430) | |
| QDIQMTQSPA TLSLSPGERA TLSCRASQSI SSFLAWYQQK PGQAPRLLIY DASYRATGIP | 60 |
| ARFSGSGSGT DFTLTISSLE PEDYAVYYCQ QRGNWPITFG QGTRLEIK | 108 |
| HC for Fab M272-D07 | |
| (SEQ ID NO: 431) | |
| EVQLLESGGG LVQPGGSLRL SCAASGFTFS FYDMWWVRQA PGKGLEWVSS IYSSGGATFY | 60 |
| ADSVKGRFTI SRDNSKNTLY LQMNSLRAED TAVYYCAKDR AYGDYVGWNG FDYWGQGTLV | 120 |
| TVSS | 124 |
| LC for Fab M271-A12 | |
| (SEQ ID NO: 432) | |
| QDIQMTQSPA TLSLSPGERA TLSCRASQSI SSFLAWYQQK PGQAPRLLIY DASYRATGIP | 60 |
| ARFSGSGSGT DFTLTISSLE PEDYAVYYCQ QRGNWPITFG QGTRLEIK | 108 |
| HC for Fab M271-A12 | |
| (SEQ ID NO: 433) | |
| EVQLLESGGG LVQPGGSLRL SCAASGFTFS FYDMWWVRQA PGKGLEWVSV IYSSGGATFY | 60 |
| ADSVKGRFTI SRDNSKNTLY LQMNSLRAED TAVYYCAKDR AYGDYVGWNG FDYWGQGTLV | 120 |
| TVSS | 124 |
| LC for Fab M270-G05 | |
| (SEQ ID NO: 434) | |
| QDIQMTQSPA TLSLSPGERA TLSCRASQSI SSFLAWYQQK PGQAPRLLIY DASYRATGIP | 60 |
| ARFSGSGSGT DFTLTISSLE PEDYAVYYCQ QRGNWPITFG QGTRLEIK | 108 |
| HC for Fab M270-G05 | |
| (SEQ ID NO: 435) | |
| EVQLLESGGG LVQPGGSLRL SCAASGFTFS FYDMWWVRQA PGKGLEWVSV IYSSGGFTDY | 60 |
| ADSVKGRFTI SRDNSKNTLY LQMNSLRAED TAVYYCAKDR AYGDYVGWNG FDYWGQGTLV | 120 |
| TVSS | 124 |
| LC for Fab M270-C10 | |
| (SEQ ID NO: 436) | |
| QDIQMTQSPA TLSLSPGERA TLSCRASQSI SSFLAWYQQK PGQAPRLLIY DASYRATGIP | 60 |
| ARFSGSGSGT DFTLTISSLE PEDYAVYYCQ QRGNWPITFG QGTRLEIK | 108 |
| HC for Fab M270-C10 | |
| (SEQ ID NO: 437) | |
| EVQLLESGGG LVQPGGSLRL SCAASGFTFS FYDMWWVRQA PGKGLEWVSY ISSSGGGTFY | 60 |
| ADSVKGRFTI SRDNSKNTLY LQMNSLRAED TAVYYCAKDR AYGDYVGWNG FDYWGQGTLV | 120 |
| TVSS | 124 |
| LC for Fab M269-D09 | |
| (SEQ ID NO: 438) | |
| QDIQMTQSPA TLSLSPGERA TLSCRASQSI SSFLAWYQQK PGQAPRLLIY DASYRATGIP | 60 |
| ARFSGSGSGT DFTLTISSLE PEDYAVYYCQ QRGNWPITFG QGTRLEIK | 108 |
| HC for Fab M269-D09 | |
| (SEQ ID NO: 439) | |
| EVQLLESGGG LVQPGGSLRL SCAASGFTFS FYDMYWVRQA PGKGLEWVSS IVPSGGATFY | 60 |
| ADSVKGRFTI SRDNSKNTLY LQMNSLRAED TAVYYCAKDR AYGDYVGWNG FDYWGQGTLV | 120 |
| TVSS | 124 |
| LC for Fab M277-B07 | |
| (SEQ ID NO: 440) | |
| QDIQMTQSPA TLSLSPGERA TLSCRASQSI SSFLAWYQQK PGQAPRLLIY DASYRATGIP | 60 |
| ARFSGSGSGT DFTLTISSLE PEDYAVYYCQ QRGNWPITFG QGTRLEIK | 108 |
| HC for Fab M277-B07 | |
| (SEQ ID NO: 441) | |
| EVQLLESGGG LVQPGGSLRL SCAASGFTFS FYEMWWVRQA PGKGLEWVSY ISPSGGGTYY | 60 |
| ADSVKGRFTI SRDNSKNTLY LQMNSLRAED TAVYYCAKDR AYGDYVGWNG FDYWGQGTLV | 120 |
| TVSS | 124 |
| LC for Fab M300-H04 | |
| (SEQ ID NO: 442) | |
| QDIQMTQSPA TLSLSPGERA TLSCRASQSI SSFLAWYQQK PGQAPRLLIY DASYRATGIP | 60 |
| ARFSGSGSGT DFTLTISSLE PEDYAVYYCQ QRGNWPITFG QGTRLEIK | 108 |
| HC for Fab M300-H04 | |
| (SEQ ID NO: 443) | |
| EVQLLESGGG LVQPGGSLRL SCAASGFTFS FYHMIWVRQA PGKGLEWVSY IYSSGGTFYA | 60 |
| DSVKGRFTIS RDNSKNTLYL QMNSLRAEDT AVYYCAKDRA YGDYVGWNGF DYWGQGTLVT | 120 |
| VSS | 123 |
| LC for Fab M271-H08 | |
| (SEQ ID NO: 444) | |
| QDIQMTQSPA TLSLSPGERA TLSCRASQSI SSFLAWYQQK PGQAPRLLIY DASYRATGIP | 60 |
| ARFSGSGSGT DFTLTISSLE PEDYAVYYCQ QRGNWPITFG QGTRLEIK | 108 |
| HC for Fab M271-H08 | |
| (SEQ ID NO: 445) | |
| EVQLLESGGG LVQPGGSLRL SCAASGFTFS FYMMWWVRQA PGKGLEWVSS ISPSGGATFY | 60 |
| ADSVKGRFTI SRDNSKNTLY LQMNSLRAED TAVYYCAKDR AYGDYVGWNG FDYWGQGTLV | 120 |
| TVSS | 124 |
| LC for Fab M306-H03 | |
| (SEQ ID NO: 446) | |
| QDIQMTQSPA TLSLSPGERA TLSCRASQSI SSFLAWYQQK PGQAPRLLIY DASYRATGIP | 60 |
| ARFSGSGSGT DFTLTISSLE PEDYAVYYCQ QRGNWPITFG QGTRLEIK | 108 |
| HC for Fab M306-H03 | |
| (SEQ ID NO: 447) | |
| EVQLLESGGG LVQPGGSLRL SCAASGFTFS FYNMWWVRQA PGKGLEWVSS ISPSGGGTFY | 60 |
| ADSVKGRFTI SRDNSKNTLY LQMNSLRAED TAVYYCAKDR AYGDYVGWNG FDYWGQGTLV | 120 |
| TVSS | 124 |
| LC for Fab M275-F06 | |
| (SEQ ID NO: 448) | |
| QDIQMTQSPA TLSLSPGERA TLSCRASQSI SSFLAWYQQK PGQAPRLLIY DASYRATGIP | 60 |
| ARFSGSGSGT DFTLTISSLE PEDYAVYYCQ QRGNWPITFG QGTRLEIK | 108 |
| HC for Fab M275-F06 | |
| (SEQ ID NO: 449) | |
| EVQLLESGGG LVQPGGSLRL SCAASGFTFS FYNMWWVRQA PGKGLEWVSV IYPSGGKTYY | 60 |
| ADSVKGRFTI SRDNSKNTLY LQMNSLRAED TAVYYCAKDR AYGDYVGWNG FDYWGQGTLV | 120 |
| TVSS | 124 |
| LC for Fab M299-C08 | |
| (SEQ ID NO: 450) | |
| QDIQMTQSPA TLSLSPGERA TLSCRASQSI SSFLAWYQQK PGQAPRLLIY DASYRATGIP | 60 |
| ARFSGSGSGT DFTLTISSLE PEDYAVYYCQ QRGNWPITFG QGTRLEIK | 108 |
| HC for Fab M299-C08 | |
| (SEQ ID NO: 451) | |
| EVQLLESGGG LVQPGGSLRL SCAASGFTFS FYNMWWVRQA PGKGLEWVSV IYPSGGPTFY | 60 |
| ADSVKGRFTI SRDNSKNTLY LQMNSLRAED TAVYYCAKDR AYGDYVGWNG FDYWGQGTLV | 120 |
| TVSS | 124 |
| LC for Fab M274-D08 | |
| (SEQ ID NO: 452) | |
| QDIQMTQSPA TLSLSPGERA TLSCRASQSI SSFLAWYQQK PGQAPRLLIY DASYRATGIP | 60 |
| ARFSGSGSGT DFTLTISSLE PEDYAVYYCQ QRGNWPITFG QGTRLEIK | 108 |
| HC for Fab M274-D08 | |
| (SEQ ID NO: 453) | |
| EVQLLESGGG LVQPGGSLRL SCAASGFTFS FYPMIWVRQA PGKGLEWVSY ISPSGGSTLY | 60 |
| ADSVKGRFTI SRDNSKNTLY LQMNSLRAED TAVYYCAKDR AYGDYVGWNG FDYWGQGTLV | 120 |
| TVSS | 124 |
| LC for Fab M303-H07 | |
| (SEQ ID NO: 454) | |
| QDIQMTQSPA TLSLSPGERA TLSCRASQSI SSFLAWYQQK PGQAPRLLIY DASYRATGIP | 60 |
| ARFSGSGSGT DFTLTISSLE PEDYAVYYCQ QRGNWPITFG QGTRLEIK | 108 |
| HC for Fab M303-H07 | |
| (SEQ ID NO: 455) | |
| EVQLLESGGG LVQPGGSLRL SCAASGFTFS FYPMIWVRQA PGKGLEWVSY ISSSGGFTDY | 60 |
| ADSVKGRFTI SRDNSKNTLY LQMNSLRAED TAVYYCAKDR AYGDYVGWNG FDYWGQGTLV | 120 |
| TVSS | 124 |
| LC for Fab M272-C10 | |
| (SEQ ID NO: 456) | |
| QDIQMTQSPA TLSLSPGERA TLSCRASQSI SSFLAWYQQK PGQAPRLLIY DASYRATGIP | 60 |
| ARFSGSGSGT DFTLTISSLE PEDYAVYYCQ QRGNWPITFG QGTRLEIK | 108 |
| HC for Fab M272-C10 | |
| (SEQ ID NO: 457) | |
| EVQLLESGGG LVQPGGSLRL SCAASGFTFS FYPMIWVRQA PGKGLEWVSY ISSSGGYTSY | 60 |
| ADSVKGRFTI SRDNSKNTLY LQMNSLRAED TAVYYCAKDR AYGDYVGWNG FDYWGQGTLV | 120 |
| TVSS | 124 |
| LC for Fab M269-C08 | |
| (SEQ ID NO: 458) | |
| QDIQMTQSPA TLSLSPGERA TLSCRASQSI SSFLAWYQQK PGQAPRLLIY DASYRATGIP | 60 |
| ARFSGSGSGT DFTLTISSLE PEDYAVYYCQ QRGNWPITFG QGTRLEIK | 108 |
| HC for Fab M269-C08 | |
| (SEQ ID NO: 459) | |
| EVQLLESGGG LVQPGGSLRL SCAASGFTFS FYPMLWVRQA PGKGLEWVSY ISGGYTGYAD | 60 |
| SVKGRFTISR DNSKNTLYLQ MNSLRAEDTA VYYCAKDRAY GDYVGWNGFD YWGQGTLVTV | 120 |
| SS | 122 |
| LC for Fab M270-F07 | |
| (SEQ ID NO: 460) | |
| QDIQMTQSPA TLSLSPGERA TLSCRASQSI SSFLAWYQQK PGQAPRLLIY DASYRATGIP | 60 |
| ARFSGSGSGT DFTLTISSLE PEDYAVYYCQ QRGNWPITFG QGTRLEIK | 108 |
| HC for Fab M270-F07 | |
| (SEQ ID NO: 461) | |
| EVQLLESGGG LVQPGGSLRL SCAASGFTFS FYPMMWVRQA PGKGLEWVSY ISFSGGYTGY | 60 |
| ADSVKGRFTI SRDNSKNTLY LQMNSLRAED TAVYYCAKDR AYGDYVGWNG FDYWGQGTLV | 120 |
| TVSS | 124 |
| LC for Fab M273-C10 | |
| (SEQ ID NO: 462) | |
| QDIQMTQSPA TLSLSPGERA TLSCRASQSI SSFLAWYQQK PGQAPRLLIY DASYRATGIP | 60 |
| ARFSGSGSGT DFTLTISSLE PEDYAVYYCQ QRGNWPITFG QGTRLEIK | 108 |
| HC for Fab M273-C10 | |
| (SEQ ID NO: 463) | |
| EVQLLESGGG LVQPGGSLRL SCAASGFTFS FYPMWWVRQA PGKGLEWVSY IYPSGGATFY | 60 |
| ADSVKGRFTI SRDNSKNTLY LQMNSLRAED TAVYYCAKDR AYGDYVGWNG FDYWGQGTLV | 120 |
| TVSS | 124 |
| LC for Fab M275-H08 | |
| (SEQ ID NO: 464) | |
| QDIQMTQSPA TLSLSPGERA TLSCRASQSI SSFLAWYQQK PGQAPRLLIY DASYRATGIP | 60 |
| ARFSGSGSGT DFTLTISSLE PEDYAVYYCQ QRGNWPITFG QGTRLEIK | 108 |
| HC for Fab M275-H08 | |
| (SEQ ID NO: 465) | |
| EVQLLESGGG LVQPGGSLRL SCAASGFTFS GYDMWWVRQA PGKGLEWVSV ISPSGGGTFY | 60 |
| ADSVKGRFTI SRDNSKNTLY LQMNSLRAED TAVYYCAKDR AYGDYVGWNG FDYWGQGTLV | 120 |
| TVSS | 124 |
| LC for Fab M269-C11 | |
| (SEQ ID NO: 466) | |
| QDIQMTQSPA TLSLSPGERA TLSCRASQSI SSFLAWYQQK PGQAPRLLIY DASYRATGIP | 60 |
| ARFSGSGSGT DFTLTISSLE PEDYAVYYCQ QRGNWPITFG QGTRLEIK | 108 |
| HC for Fab M269-C11 | |
| (SEQ ID NO: 467) | |
| EVQLLESGGG LVQPGGSLRL SCAASGFTFS GYDMWWVRQA PGKGLEWVSV IYSSGGTTFY | 60 |
| ADSVKGRFTI SRDNSKNTLY LQMNSLRAED TAVYYCAKDR AYGDYVGWNG FDYWGQGTLV | 120 |
| TVSS | 124 |
| LC for Fab M304-B05 | |
| (SEQ ID NO: 468) | |
| QDIQMTQSPA TLSLSPGERA TLSCRASQSI SSFLAWYQQK PGQAPRLLIY DASYRATGIP | 60 |
| ARFSGSGSGT DFTLTISSLE PEDYAVYYCQ QRGNWPITFG QGTRLEIK | 108 |
| HC for Fab M304-B05 | |
| (SEQ ID NO: 469) | |
| EVQLLESGGG LVQPGGSLRL SCAASGFTFS GYNMWWVRQA PGKGLEWVSV IYPSGGATFY | 60 |
| ADSVKGRFTI SRDNSKNTLY LQMNSLRAED TAVYYCAKDR AYGDYVGWNG FDYWGQGTLV | 120 |
| TVSS | 124 |
| LC for Fab M276-F12 | |
| (SEQ ID NO: 470) | |
| QDIQMTQSPA TLSLSPGERA TLSCRASQSI SSFLAWYQQK PGQAPRLLIY DASYRATGIP | 60 |
| ARFSGSGSGT DFTLTISSLE PEDYAVYYCQ QRGNWPITFG QGTRLEIK | 108 |
| HC for Fab M276-F12 | |
| (SEQ ID NO: 471) | |
| EVQLLESGGG LVQPGGSLRL SCAASGFTFS GYPMWWVRQA PGKGLEWVSY ISSSGGGTFY | 60 |
| ADSVKGRFTI SRDNSKNTLY LQMNSLRAED TAVYYCAKDR AYGDYVGWNG FDYWGQGTLV | 120 |
| TVSS | 124 |
| LC for Fab M299-D06 | |
| (SEQ ID NO: 472) | |
| QDIQMTQSPA TLSLSPGERA TLSCRASQSI SSFLAWYQQK PGQAPRLLIY DASYRATGIP | 60 |
| ARFSGSGSGT DFTLTISSLE PEDYAVYYCQ QRGNWPITFG QGTRLEIK | 108 |
| HC for Fab M299-D06 | |
| (SEQ ID NO: 473) | |
| EVQLLESGGG LVQPGGSLRL SCAASGFTFS HYAMIWVRQA PGKGLEWVSY IVPSGGWTDY | 60 |
| ADSVKGRFTI SRDNSKNTLY LQMNSLRAED TAVYYCAKDR AYGDYVGWNG FDYWGQGTLV | 120 |
| TVSS | 124 |
| LC for Fab M271-G12 | |
| (SEQ ID NO: 474) | |
| QDIQMTQSPA TLSLSPGERA TLSCRASQSI SSFLAWYQQK PGQAPRLLIY DASYRATGIP | 60 |
| ARFSGSGSGT DFTLTISSLE PEDYAVYYCQ QRGNWPITFG QGTRLEIK | 108 |
| HC for Fab M271-G12 | |
| (SEQ ID NO: 475) | |
| EVQLLESGGG LVQPGGSLRL SCAASGFTFS HYAMIWVRQA PGKGLEWVSY IVPSGGWTGY | 60 |
| ADSVKGRFTI SRDNSKNTLY LQMNSLRAED TAVYYCAKDR AYGDYVGWNG FDYWGQGTLV | 120 |
| TVSS | 124 |
| LC for Fab M272-G11 | |
| (SEQ ID NO: 476) | |
| QDIQMTQSPA TLSLSPGERA TLSCRASQSI SSFLAWYQQK PGQAPRLLIY DASYRATGIP | 60 |
| ARFSGSGSGT DFTLTISSLE PEDYAVYYCQ QRGNWPITFG QGTRLEIK | 108 |
| HC for Fab M272-G11 | |
| (SEQ ID NO: 477) | |
| EVQLLESGGG LVQPGGSLRL SCAASGFTFS HYDMWWVRQA PGKGLEWVSS ISPSGGATFY | 60 |
| ADSVKGRFTI SRDNSKNTLY LQMNSLRAED TAVYYCAKDR AYGDYVGWNG FDYWGQGTLV | 120 |
| TVSS | 124 |
| LC for Fab M269-B12 | |
| (SEQ ID NO: 478) | |
| QDIQMTQSPA TLSLSPGERA TLSCRASQSI SSFLAWYQQK PGQAPRLLIY DASYRATGIP | 60 |
| ARFSGSGSGT DFTLTISSLE PEDYAVYYCQ QRGNWPITFG QGTRLEIK | 108 |
| HC for Fab M269-B12 | |
| (SEQ ID NO: 479) | |
| EVQLLESGGG LVQPGGSLRL SCAASGFTFS HYDMWWVRQA PGKGLEWVSV IVSSGKTFYA | 60 |
| DSVKGRFTIS RDNSKNTLYL QMNSLRAEDT AVYYCAKDRA YGDYVGWNGF DYWGQGTLVT | 120 |
| VSS | 123 |
| LC for Fab M268-A01 | |
| (SEQ ID NO: 480) | |
| QDIQMTQSPA TLSLSPGERA TLSCRASQSI SSFLAWYQQK PGQAPRLLIY DASYRATGIP | 60 |
| ARFSGSGSGT DFTLTISSLE PEDYAVYYCQ QRGNWPITFG QGTRLEIK | 108 |
| HC for Fab M268-A01 | |
| (SEQ ID NO: 481) | |
| EVQLLESGGG LVQPGGSLRL SCAASGFTFS HYDMWWVRQA PGKGLEWVSV IYPSGGFTDY | 60 |
| ADSVKGRFTI SRDNSKNTLY LQMNSLRAED TAVYYCAKDR AYGDYVGWNG FDYWGQGTLV | 120 |
| TVSS | 124 |
| LC for Fab M277-B12 | |
| (SEQ ID NO: 482) | |
| QDIQMTQSPA TLSLSPGERA TLSCRASQSI SSFLAWYQQK PGQAPRLLIY DASYRATGIP | 60 |
| ARFSGSGSGT DFTLTISSLE PEDYAVYYCQ QRGNWPITFG QGTRLEIK | 108 |
| HC for Fab M277-B12 | |
| (SEQ ID NO: 483) | |
| EVQLLESGGG LVQPGGSLRL SCAASGFTFS HYDMWWVRQA PGKGLEWVSV IYPSGGHTLY | 60 |
| ADSVKGRFTI SRDNSKNTLY LQMNSLRAED TAVYYCAKDR AYGDYVGWNG FDYWGQGTLV | 120 |
| TVSS | 124 |
| LC for Fab M273-G07 | |
| (SEQ ID NO: 484) | |
| QDIQMTQSPA TLSLSPGERA TLSCRASQSI SSFLAWYQQK PGQAPRLLIY DASYRATGIP | 60 |
| ARFSGSGSGT DFTLTISSLE PEDYAVYYCQ QRGNWPITFG QGTRLEIK | 108 |
| HC for Fab M273-G07 | |
| (SEQ ID NO: 485) | |
| EVQLLESGGG LVQPGGSLRL SCAASGFTFS HYDMWWVRQA PGKGLEWVSV IYPSGGPTYY | 60 |
| ADSVKGRFTI SRDNSKNTLY LQMNSLRAED TAVYYCAKDR AYGDYVGWNG FDYWGQGTLV | 120 |
| TVSS | 124 |
| LC for Fab M274-F01 | |
| (SEQ ID NO: 486) | |
| QDIQMTQSPA TLSLSPGERA TLSCRASQSI SSFLAWYQQK PGQAPRLLIY DASYRATGIP | 60 |
| ARFSGSGSGT DFTLTISSLE PEDYAVYYCQ QRGNWPITFG QGTRLEIK | 108 |
| HC for Fab M274-F01 | |
| (SEQ ID NO: 487) | |
| EVQLLESGGG LVQPGGSLRL SCAASGFTFS HYDMWWVRQA PGKGLEWVSV IYPSGGVTYY | 60 |
| ADSVKGRFTI SRDNSKNTLY LQMNSLRAED TAVYYCAKDR AYGDYVGWNG FDYWGQGTLV | 120 |
| TVSS | 124 |
| LC for Fab M275-E12 | |
| (SEQ ID NO: 488) | |
| QDIQMTQSPA TLSLSPGERA TLSCRASQSI SSFLAWYQQK PGQAPRLLIY DASYRATGIP | 60 |
| ARFSGSGSGT DFTLTISSLE PEDYAVYYCQ QRGNWPITFG QGTRLEIK | 108 |
| HC for Fab M275-E12 | |
| (SEQ ID NO: 489) | |
| EVQLLESGGG LVQPGGSLRL SCAASGFTFS HYDMWWVRQA PGKGLEWVSV IYSSGGFTGY | 60 |
| ADSVKGRFTI SRDNSKNTLY LQMNSLRAED TAVYYCAKDR AYGDYVGWNG FDYWGQGTLV | 120 |
| TVSS | 124 |
| LC for Fab M298-E01 | |
| (SEQ ID NO: 490) | |
| QDIQMTQSPA TLSLSPGERA TLSCRASQSI SSFLAWYQQK PGQAPRLLIY DASYRATGIP | 60 |
| ARFSGSGSGT DFTLTISSLE PEDYAVYYCQ QRGNWPITFG QGTRLEIK | 108 |
| HC for Fab M298-E01 | |
| (SEQ ID NO: 491) | |
| EVQLLESGGG LVQPGGSLRL SCAASGFTFS HYDMWWVRQA PGKGLEWVSV IYSSGGPTYY | 60 |
| ADSVKGRFTI SRDNSKNTLY LQMNSLRAED TAVYYCAKDR AYGDYVGWNG FDYWGQGTLV | 120 |
| TVSS | 124 |
| LC for Fab M274-G10 | |
| (SEQ ID NO: 492) | |
| QDIQMTQSPA TLSLSPGERA TLSCRASQSI SSFLAWYQQK PGQAPRLLIY DASYRATGIP | 60 |
| ARFSGSGSGT DFTLTISSLE PEDYAVYYCQ QRGNWPITFG QGTRLEIK | 108 |
| HC for Fab M274-G10 | |
| (SEQ ID NO: 493) | |
| EVQLLESGGG LVQPGGSLRL SCAASGFTFS HYDMWWVRQA PGKGLEWVSY ISPSGGFTSY | 60 |
| ADSVKGRFTI SRDNSKNTLY LQMNSLRAED TAVYYCAKDR AYGDYVGWNG FDYWGQGTLV | 120 |
| TVSS | 124 |
| LC for Fab M268-G01 | |
| (SEQ ID NO: 494) | |
| QDIQMTQSPA TLSLSPGERA TLSCRASQSI SSFLAWYQQK PGQAPRLLIY DASYRATGIP | 60 |
| ARFSGSGSGT DFTLTISSLE PEDYAVYYCQ QRGNWPITFG QGTRLEIK | 108 |
| HC for Fab M268-G01 | |
| (SEQ ID NO: 495) | |
| EVQLLESGGG LVQPGGSLRL SCAASGFTFS HYEMWWVRQA PGKGLEWVSS ISSSGGGTFY | 60 |
| ADSVKGRFTI SRDNSKNTLY LQMNSLRAED TAVYYCAKDR AYGDYVGWNG FDYWGQGTLV | 120 |
| TVSS | 124 |
| LC for Fab M269-H02 | |
| (SEQ ID NO: 496) | |
| QDIQMTQSPA TLSLSPGERA TLSCRASQSI SSFLAWYQQK PGQAPRLLIY DASYRATGIP | 60 |
| ARFSGSGSGT DFTLTISSLE PEDYAVYYCQ QRGNWPITFG QGTRLEIK | 108 |
| HC for Fab M269-H02 | |
| (SEQ ID NO: 497) | |
| EVQLLESGGG LVQPGGSLRL SCAASGFTFS HYEMWWVRQA PGKGLEWVSY IGSSGGSTYY | 60 |
| ADSVKGRFTI SRDNSKNTLY LQMNSLRAED TAVYYCAKDR AYGDYVGWNG FDYWGQGTLV | 120 |
| TVSS | 124 |
| LC for Fab M277-G05 | |
| (SEQ ID NO: 498) | |
| QDIQMTQSPA TLSLSPGERA TLSCRASQSI SSFLAWYQQK PGQAPRLLIY DASYRATGIP | 60 |
| ARFSGSGSGT DFTLTISSLE PEDYAVYYCQ QRGNWPITFG QGTRLEIK | 108 |
| HC for Fab M277-G05 | |
| (SEQ ID NO: 499) | |
| EVQLLESGGG LVQPGGSLRL SCAASGFTFS HYMMIWVRQA PGKGLEWVSG ISPSGGYTGY | 60 |
| ADSVKGRFTI SRDNSKNTLY LQMNSLRAED TAVYYCAKDR AYGDYVGWNG FDYWGQGTLV | 120 |
| TVSS | 124 |
| LC for Fab M271-H01 | |
| (SEQ ID NO: 500) | |
| QDIQMTQSPA TLSLSPGERA TLSCRASQSI SSFLAWYQQK PGQAPRLLIY DASYRATGIP | 60 |
| ARFSGSGSGT DFTLTISSLE PEDYAVYYCQ QRGNWPITFG QGTRLEIK | 108 |
| HC for Fab M271-H01 | |
| (SEQ ID NO: 501) | |
| EVQLLESGGG LVQPGGSLRL SCAASGFTFS HYMMWWVRQA PGKGLEWVSS IYPSGGGTYY | 60 |
| ADSVKGRFTI SRDNSKNTLY LQMNSLRAED TAVYYCAKDR AYGDYVGWNG FDYWGQGTLV | 120 |
| TVSS | 124 |
| LC for Fab M303-F06 | |
| (SEQ ID NO: 502) | |
| QDIQMTQSPA TLSLSPGERA TLSCRASQSI SSFLAWYQQK PGQAPRLLIY DASYRATGIP | 60 |
| ARFSGSGSGT DFTLTISSLE PEDYAVYYCQ QRGNWPITFG QGTRLEIK | 108 |
| HC for Fab M303-F06 | |
| (SEQ ID NO: 503) | |
| EVQLLESGGG LVQPGGSLRL SCAASGFTFS HYMMWWVRQA PGKGLEWVSS IYPSGGTYYA | 60 |
| DSVKGRFTIS RDNSKNTLYL QMNSLRAEDT AVYYCAKDRA YGDYVGWNGF DYWGQGTLVT | 120 |
| VSS | 123 |
| LC for Fab M272-B03 | |
| (SEQ ID NO: 504) | |
| QDIQMTQSPA TLSLSPGERA TLSCRASQSI SSFLAWYQQK PGQAPRLLIY DASYRATGIP | 60 |
| ARFSGSGSGT DFTLTISSLE PEDYAVYYCQ QRGNWPITFG QGTRLEIK | 108 |
| HC for Fab M272-B03 | |
| (SEQ ID NO: 505) | |
| EVQLLESGGG LVQPGGSLRL SCAASGFTFS HYPMFWVRQA PGKGLEWVSY ISSSGGWTDY | 60 |
| ADSVKGRFTI SRDNSKNTLY LQMNSLRAED TAVYYCAKDR AYGDYVGWNG FDYWGQGTLV | 120 |
| TVSS | 124 |
| LC for Fab M272-B04 | |
| (SEQ ID NO: 506) | |
| QDIQMTQSPA TLSLSPGERA TLSCRASQSI SSFLAWYQQK PGQAPRLLIY DASYRATGIP | 60 |
| ARFSGSGSGT DFTLTISSLE PEDYAVYYCQ QRGNWPITFG QGTRLEIK | 108 |
| HC for Fab M272-B04 | |
| (SEQ ID NO: 507) | |
| EVQLLESGGG LVQPGGSLRL SCAASGFTFS HYPMIWVRQA PGKGLEWVSY ISPSGGGTFY | 60 |
| ADSVKGRFTI SRDNSKNTLY LQMNSLRAED TAVYYCAKDR AYGDYVGWNG FDYWGQGTLV | 120 |
| TVSS | 124 |
| LC for Fab M272-H03 | |
| (SEQ ID NO: 508) | |
| QDIQMTQSPA TLSLSPGERA TLSCRASQSI SSFLAWYQQK PGQAPRLLIY DASYRATGIP | 60 |
| ARFSGSGSGT DFTLTISSLE PEDYAVYYCQ QRGNWPITFG QGTRLEIK | 108 |
| HC for Fab M272-H03 | |
| (SEQ ID NO: 509) | |
| EVQLLESGGG LVQPGGSLRL SCAASGFTFS HYPMIWVRQA PGKGLEWVSY ISSSGGGTFY | 60 |
| ADSVKGRFTI SRDNSKNTLY LQMNSLRAED TAVYYCAKDR AYGDYVGWNG FDYWGQGTLV | 120 |
| TVSS | 124 |
| LC for Fab M274-G12 | |
| (SEQ ID NO: 510) | |
| QDIQMTQSPA TLSLSPGERA TLSCRASQSI SSFLAWYQQK PGQAPRLLIY DASYRATGIP | 60 |
| ARFSGSGSGT DFTLTISSLE PEDYAVYYCQ QRGNWPITFG QGTRLEIK | 108 |
| HC for Fab M274-G12 | |
| (SEQ ID NO: 511) | |
| EVQLLESGGG LVQPGGSLRL SCAASGFTFS HYPMIWVRQA PGKGLEWVSY IYSSGGGTFY | 60 |
| ADSVKGRFTI SRDNSKNTLY LQMNSLRAED TAVYYCAKDR AYGDYVGWNG FDYWGQGTLV | 120 |
| TVSS | 124 |
| LC for Fab M274-F02 | |
| (SEQ ID NO: 512) | |
| QDIQMTQSPA TLSLSPGERA TLSCRASQSI SSFLAWYQQK PGQAPRLLIY DASYRATGIP | 60 |
| ARFSGSGSGT DFTLTISSLE PEDYAVYYCQ QRGNWPITFG QGTRLEIK | 108 |
| HC for Fab M274-F02 | |
| (SEQ ID NO: 513) | |
| EVQLLESGGG LVQPGGSLRL SCAASGFTFS HYPMLWVRQA PGKGLEWVSY IYPSGGGTFY | 60 |
| ADSVKGRFTI SRDNSKNTLY LQMNSLRAED TAVYYCAKDR AYGDYVGWNG FDYWGQGTLV | 120 |
| TVSS | 124 |
| LC for Fab M276-H11 | |
| (SEQ ID NO: 514) | |
| QDIQMTQSPA TLSLSPGERA TLSCRASQSI SSFLAWYQQK PGQAPRLLIY DASYRATGIP | 60 |
| ARFSGSGSGT DFTLTISSLE PEDYAVYYCQ QRGNWPITFG QGTRLEIK | 108 |
| HC for Fab M276-H11 | |
| (SEQ ID NO: 515) | |
| EVQLLESGGG LVQPGGSLRL SCAASGFTFS HYPMMWVRQA PGKGLEWVSY ISSSGGYTGY | 60 |
| ADSVKGRFTI SRDNSKNTLY LQMNSLRAED TAVYYCAKDR AYGDYVGWNG FDYWGQGTLV | 120 |
| TVSS | 124 |
| LC for Fab M303-C04 | |
| (SEQ ID NO: 516) | |
| QDIQMTQSPA TLSLSPGERA TLSCRASQSI SSFLAWYQQK PGQAPRLLIY DASYRATGIP | 60 |
| ARFSGSGSGT DFTLTISSLE PEDYAVYYCQ QRGNWPITFG QGTRLEIK | 108 |
| HC for Fab M303-C04 | |
| (SEQ ID NO: 517) | |
| EVQLLESGGG LVQPGGSLRL SCAASGFTFS HYPMMWVRQA PGKGLEWVSY IYSSGGGTYY | 60 |
| ADSVKGRFTI SRDNSKNTLY LQMNSLRAED TAVYYCAKDR AYGDYVGWNG FDYWGQGTLV | 120 |
| TVSS | 124 |
| LC for Fab M276-G09 | |
| (SEQ ID NO: 518) | |
| QDIQMTQSPA TLSLSPGERA TLSCRASQSI SSFLAWYQQK PGQAPRLLIY DASYRATGIP | 60 |
| ARFSGSGSGT DFTLTISSLE PEDYAVYYCQ QRGNWPITFG QGTRLEIK | 108 |
| HC for Fab M276-G09 | |
| (SEQ ID NO: 519) | |
| EVQLLESGGG LVQPGGSLRL SCAASGFTFS HYPMVWVRQA PGKGLEWVSY ISPSGGYTGY | 60 |
| ADSVKGRFTI SRDNSKNTLY LQMNSLRAED TAVYYCAKDR AYGDYVGWNG FDYWGQGTLV | 120 |
| TVSS | 124 |
| LC for Fab M298-D05 | |
| (SEQ ID NO: 520) | |
| QDIQMTQSPA TLSLSPGERA TLSCRASQSI SSFLAWYQQK PGQAPRLLIY DASYRATGIP | 60 |
| ARFSGSGSGT DFTLTISSLE PEDYAVYYCQ QRGNWPITFG QGTRLEIK | 108 |
| HC for Fab M298-D05 | |
| (SEQ ID NO: 521) | |
| EVQLLESGGG LVQPGGSLRL SCAASGFTFS HYPMWWVRQA PGKGLEWVSS ISPSGGATFY | 60 |
| ADSVKGRFTI SRDNSKNTLY LQMNSLRAED TAVYYCAKDR AYGDYVGWNG FDYWGQGTLV | 120 |
| TVSS | 124 |
| LC for Fab M305-G05 | |
| (SEQ ID NO: 522) | |
| QDIQMTQSPA TLSLSPGERA TLSCRASQSI SSFLAWYQQK PGQAPRLLIY DASYRATGIP | 60 |
| ARFSGSGSGT DFTLTISSLE PEDYAVYYCQ QRGNWPITFG QGTRLEIK | 108 |
| HC for Fab M305-G05 | |
| (SEQ ID NO: 523) | |
| EVQLLESGGG LVQPGGSLRL SCAASGFTFS HYPMWWVRQA PGKGLEWVSV IYSSGGGTFY | 60 |
| ADSVKGRFTI SRDNSKNTLY LQMNSLRAED TAVYYCAKDR AYGDYVGWNG FDYWGQGTLV | 120 |
| TVSS | 124 |
| LC for Fab M269-D03 | |
| (SEQ ID NO: 524) | |
| QDIQMTQSPA TLSLSPGERA TLSCRASQSI SSFLAWYQQK PGQAPRLLIY DASYRATGIP | 60 |
| ARFSGSGSGT DFTLTISSLE PEDYAVYYCQ QRGNWPITFG QGTRLEIK | 108 |
| HC for Fab M269-D03 | |
| (SEQ ID NO: 525) | |
| EVQLLESGGG LVQPGGSLRL SCAASGFTFS HYPMWWVRQA PGKGLEWVSW IVPSGGFTLY | 60 |
| ADSVKGRFTI SRDNSKNTLY LQMNSLRAED TAVYYCAKDR AYGDYVGWNG FDYWGQGTLV | 120 |
| TVSS | 124 |
| LC for Fab M275-A08 | |
| (SEQ ID NO: 526) | |
| QDIQMTQSPA TLSLSPGERA TLSCRASQSI SSFLAWYQQK PGQAPRLLIY DASYRATGIP | 60 |
| ARFSGSGSGT DFTLTISSLE PEDYAVYYCQ QRGNWPITFG QGTRLEIK | 108 |
| HC for Fab M275-A08 | |
| (SEQ ID NO: 527) | |
| EVQLLESGGG LVQPGGSLRL SCAASGFTFS HYPMWWVRQA PGKGLEWVSY IHPSGGGTLY | 60 |
| ADSVKGRFTI SRDNSKNTLY LQMNSLRAED TAVYYCAKDR AYGDYVGWNG FDYWGQGTLV | 120 |
| TVSS | 124 |
| LC for Fab M299-A12 | |
| (SEQ ID NO: 528) | |
| QDIQMTQSPA TLSLSPGERA TLSCRASQSI SSFLAWYQQK PGQAPRLLIY DASYRATGIP | 60 |
| ARFSGSGSGT DFTLTISSLE PEDYAVYYCQ QRGNWPITFG QGTRLEIK | 108 |
| HC for Fab M299-A12 | |
| (SEQ ID NO: 529) | |
| EVQLLESGGG LVQPGGSLRL SCAASGFTFS HYPMWWVRQA PGKGLEWVSY ISSSGGGTFY | 60 |
| ADSVKGRFTI SRDNSKNTLY LQMNSLRAED TAVYYCAKDR AYGDYVGWNG FDYWGQGTLV | 120 |
| TVSS | 124 |
| LC for Fab M302-D10 | |
| (SEQ ID NO: 530) | |
| QDIQMTQSPA TLSLSPGERA TLSCRASQSI SSFLAWYQQK PGQAPRLLIY DASYRATGIP | 60 |
| ARFSGSGSGT DFTLTISSLE PEDYAVYYCQ QRGNWPITFG QGTRLEIK | 108 |
| HC for Fab M302-D10 | |
| (SEQ ID NO: 531) | |
| EVQLLESGGG LVQPGGSLRL SCAASGFTFS HYPMWWVRQA PGKGLEWVSY IVPSGGATFY | 60 |
| ADSVKGRFTI SRDNSKNTLY LQMNSLRAED TAVYYCAKDR AYGDYVGWNG FDYWGQGTLV | 120 |
| TVSS | 124 |
| LC for Fab M272-H12 | |
| (SEQ ID NO: 532) | |
| QDIQMTQSPA TLSLSPGERA TLSCRASQSI SSFLAWYQQK PGQAPRLLIY DASYRATGIP | 60 |
| ARFSGSGSGT DFTLTISSLE PEDYAVYYCQ QRGNWPITFG QGTRLEIK | 108 |
| HC for Fab M272-H12 | |
| (SEQ ID NO: 533) | |
| EVQLLESGGG LVQPGGSLRL SCAASGFTFS HYPMWWVRQA PGKGLEWVSY IYPSGGGTYY | 60 |
| ADSVKGRFTI SRDNSKNTLY LQMNSLRAED TAVYYCAKDR AYGDYVGWNG FDYWGQGTLV | 120 |
| TVSS | 124 |
| LC for Fab M304-G08 | |
| (SEQ ID NO: 534) | |
| QDIQMTQSPA TLSLSPGERA TLSCRASQSI SSFLAWYQQK PGQAPRLLIY DASYRATGIP | 60 |
| ARFSGSGSGT DFTLTISSLE PEDYAVYYCQ QRGNWPITFG QGTRLEIK | 108 |
| HC for Fab M304-G08 | |
| (SEQ ID NO: 535) | |
| EVQLLESGGG LVQPGGSLRL SCAASGFTFS HYQMWWVRQA PGKGLEWVSS ISSSGGGTYY | 60 |
| ADSVKGRFTI SRDNSKNTLY LQMNSLRAED TAVYYCAKDR AYGDYVGWNG FDYWGQGTLV | 120 |
| TVSS | 124 |
| LC for Fab M298-A01 | |
| (SEQ ID NO: 536) | |
| QDIQMTQSPA TLSLSPGERA TLSCRASQSI SSFLAWYQQK PGQAPRLLIY DASYRATGIP | 60 |
| ARFSGSGSGT DFTLTISSLE PEDYAVYYCQ QRGNWPITFG QGTRLEIK | 108 |
| HC for Fab M298-A01 | |
| (SEQ ID NO: 537) | |
| EVQLLESGGG LVQPGGSLRL SCAASGFTFS HYSMMWVRQD PGKGLEWVSY ISPSGGYTGY | 60 |
| ADSVKGRFTI SRDNSKNTLY LQMNSLRAED TAVYYCAKDR AYGDYVGWNG FDYWGQGTLV | 120 |
| TVSS | 124 |
| LC for Fab M272-E07 | |
| (SEQ ID NO: 538) | |
| QDIQMTQSPA TLSLSPGERA TLSCRASQSI SSFLAWYQQK PGQAPRLLIY DASYRATGIP | 60 |
| ARFSGSGSGT DFTLTISSLE PEDYAVYYCQ QRGNWPITFG QGTRLEIK | 108 |
| HC for Fab M272-E07 | |
| (SEQ ID NO: 539) | |
| EVQLLESGGG LVQPGGSLRL SCAASGFTFS HYSMWWVRQA PGKGLEWVSV IYPSGGATFY | 60 |
| ADSVKGRFTI SRDNSKNTLY LQMNSLRAED TAVYYCAKDR AYGDYVGWNG FDYWGQGTLV | 120 |
| TVSS | 124 |
| LC for Fab M268-F03 | |
| (SEQ ID NO: 540) | |
| QDIQMTQSPA TLSLSPGERA TLSCRASQSI SSFLAWYQQK PGQAPRLLIY DASYRATGIP | 60 |
| ARFSGSGSGT DFTLTISSLE PEDYAVYYCQ QRGNWPITFG QGTRLEIK | 108 |
| HC for Fab M268-F03 | |
| (SEQ ID NO: 541) | |
| EVQLLESGGG LVQPGGSLRL SCAASGFTFS IYDMWWVRQA PGKGLEWVSV ISPSGGSTYY | 60 |
| ADSVKGRFTI SRDNSKNTLY LQMNSLRAED TAVYYCAKDR AYGDYVGWNG FDYWGQGTLV | 120 |
| TVSS | 124 |
| LC for Fab M268-B08 | |
| (SEQ ID NO: 542) | |
| QDIQMTQSPA TLSLSPGERA TLSCRASQSI SSFLAWYQQK PGQAPRLLIY DASYRATGIP | 60 |
| ARFSGSGSGT DFTLTISSLE PEDYAVYYCQ QRGNWPITFG QGTRLEIK | 108 |
| HC for Fab M268-B08 | |
| (SEQ ID NO: 543) | |
| EVQLLESGGG LVQPGGSLRL SCAASGFTFS IYDMWWVRQA PGKGLEWVSV IYPSGGATWY | 60 |
| ADSVKGRFTI SRDNSKNTLY LQMNSLRAED TAVYYCAKDR AYGDYVGWNG FDYWGQGTLV | 120 |
| TVSS | 124 |
| LC for Fab M271-A03 | |
| (SEQ ID NO: 544) | |
| QDIQMTQSPA TLSLSPGERA TLSCRASQSI SSFLAWYQQK PGQAPRLLIY DASYRATGIP | 60 |
| ARFSGSGSGT DFTLTISSLE PEDYAVYYCQ QRGNWPITFG QGTRLEIK | 108 |
| HC for Fab M271-A03 | |
| (SEQ ID NO: 545) | |
| EVQLLESGGG LVQPGGSLRL SCAASGFTFS IYDMWWVRQA PGKGLEWVSV IYPSGGPTFY | 60 |
| ADSVKGRFTI SRDNSKNTLY LQMNSLRAED TAVYYCAKDR AYGDYVGWNG FDYWGQGTLV | 120 |
| TVSS | 124 |
| LC for Fab M270-G02 | |
| (SEQ ID NO: 546) | |
| QDIQMTQSPA TLSLSPGERA TLSCRASQSI SSFLAWYQQK PGQAPRLLIY DASYRATGIP | 60 |
| ARFSGSGSGT DFTLTISSLE PEDYAVYYCQ QRGNWPITFG QGTRLEIK | 108 |
| HC for Fab M270-G02 | |
| (SEQ ID NO: 547) | |
| EVQLLESGGG LVQPGGSLRL SCAASGFTFS IYDMWWVRQA PGKGLEWVSV IYPSGGVTFY | 60 |
| ADSVKGRFTI SRDNSKNTLY LQMNSLRAED TAVYYCAKDR AYGDYVGWNG FDYWGQGTLV | 120 |
| TVSS | 124 |
| LC for Fab M277-H05 | |
| (SEQ ID NO: 548) | |
| QDIQMTQSPA TLSLSPGERA TLSCRASQSI SSFLAWYQQK PGQAPRLLIY DASYRATGIP | 60 |
| ARFSGSGSGT DFTLTISSLE PEDYAVYYCQ QRGNWPITFG QGTRLEIK | 108 |
| HC for Fab M277-H05 | |
| (SEQ ID NO: 549) | |
| EVQLLESGGG LVQPGGSLRL SCAASGFTFS IYDMWWVRQA PGKGLEWVSV IYSSGGFTGY | 60 |
| ADSVKGRFTI SRDNSKNTLY LQMNSLRAED TAVYYCAKDR AYGDYVGWNG FDYWGQGTLV | 120 |
| TVSS | 124 |
| LC for Fab M273-F04 | |
| (SEQ ID NO: 550) | |
| QDIQMTQSPA TLSLSPGERA TLSCRASQSI SSFLAWYQQK PGQAPRLLIY DASYRATGIP | 60 |
| ARFSGSGSGT DFTLTISSLE PEDYAVYYCQ QRGNWPITFG QGTRLEIK | 108 |
| HC for Fab M273-F04 | |
| (SEQ ID NO: 551) | |
| EVQLLESGGG LVQPGGSLRL SCAASGFTFS IYPMIWVRQA PGKGLEWVSY ISPSGGYTSY | 60 |
| ADSVKGRFTI SRDNSKNTLY LQMNSLRAED TAVYYCAKDR AYGDYVGWNG FDYWGQGTLV | 120 |
| TVSS | 124 |
| LC for Fab M268-G10 | |
| (SEQ ID NO: 552) | |
| QDIQMTQSPA TLSLSPGERA TLSCRASQSI SSFLAWYQQK PGQAPRLLIY DASYRATGIP | 60 |
| ARFSGSGSGT DFTLTISSLE PEDYAVYYCQ QRGNWPITFG QGTRLEIK | 108 |
| HC for Fab M268-G10 | |
| (SEQ ID NO: 553) | |
| EVQLLESGGG LVQPGGSLRL SCAASGFTFS IYPMWWVRQA PGKGLEWVSY ISPSGGFTSY | 60 |
| ADSVKGRFTI SRDNSKNTLY LQMNSLRAED TAVYYCAKDR AYGDYVGWNG FDYWGQGTLV | 120 |
| TVSS | 124 |
| LC for Fab M300-F01 | |
| (SEQ ID NO: 554) | |
| QDIQMTQSPA TLSLSPGERA TLSCRASQSI SSFLAWYQQK PGQAPRLLIY DASYRATGIP | 60 |
| ARFSGSGSGT DFTLTISSLE PEDYAVYYCQ QRGNWPITFG QGTRLEIK | 108 |
| HC for Fab M300-F01 | |
| (SEQ ID NO: 555) | |
| EVQLLESGGG LVQPGGSLRL SCAASGFTFS IYPMWWVRQA PGKGLEWVSY ISPSGGGTYY | 60 |
| ADSVKGRFTI SRDNSKNTLY LQMNSLRAED TAVYYCAKDR AYGDYVGWNG FDYWGQGTLV | 120 |
| TVSS | 124 |
| LC for Fab M273-H03 | |
| (SEQ ID NO: 556) | |
| QDIQMTQSPA TLSLSPGERA TLSCRASQSI SSFLAWYQQK PGQAPRLLIY DASYRATGIP | 60 |
| ARFSGSGSGT DFTLTISSLE PEDYAVYYCQ QRGNWPITFG QGTRLEIK | 108 |
| HC for Fab M273-H03 | |
| (SEQ ID NO: 557) | |
| EVQLLESGGG LVQPGGSLRL SCAASGFTFS IYPMWWVRQA PGKGLEWVSY ISSSGGWTDY | 60 |
| ADSVKGRFTI SRDNSKNTLY LQMNSLRAED TAVYYCAKDR AYGDYVGWNG FDYWGQGTLV | 120 |
| TVSS | 124 |
| LC for Fab M277-C11 | |
| (SEQ ID NO: 558) | |
| QDIQMTQSPA TLSLSPGERA TLSCRASQSI SSFLAWYQQK PGQAPRLLIY DASYRATGIP | 60 |
| ARFSGSGSGT DFTLTISSLE PEDYAVYYCQ QRGNWPITFG QGTRLEIK | 108 |
| HC for Fab M277-C11 | |
| (SEQ ID NO: 559) | |
| EVQLLESGGG LVQPGGSLRL SCAASGFTFS IYPMWWVRQA PGKGLEWVSY IVPSGGMTYY | 60 |
| ADSVKGRFTI SRDNSKNTLY LQMNSLRAED TAVYYCAKDR AYGDYVGWNG FDYWGQGTLV | 120 |
| TVSS | 124 |
| LC for Fab M273-G06 | |
| (SEQ ID NO: 560) | |
| QDIQMTQSPA TLSLSPGERA TLSCRASQSI SSFLAWYQQK PGQAPRLLIY DASYRATGIP | 60 |
| ARFSGSGSGT DFTLTISSLE PEDYAVYYCQ QRGNWPITFG QGTRLEIK | 108 |
| HC for Fab M273-G06 | |
| (SEQ ID NO: 561) | |
| EVQLLESGGG LVQPGGSLRL SCAASGFTFS IYPMWWVRQA PGKGLEWVSY IYPSGGGTFY | 60 |
| ADSVKGRFTI SRDNSKNTLY LQMNSLRAED TAVYYCAKDR AYGDYVGWNG FDYWGQGTLV | 120 |
| TVSS | 124 |
| LC for Fab M273-B10 | |
| (SEQ ID NO: 562) | |
| QDIQMTQSPA TLSLSPGERA TLSCRASQSI SSFLAWYQQK PGQAPRLLIY DASYRATGIP | 60 |
| ARFSGSGSGT DFTLTISSLE PEDYAVYYCQ QRGNWPITFG QGTRLEIK | 108 |
| HC for Fab M273-B10 | |
| (SEQ ID NO: 563) | |
| EVQLLESGGG LVQPGGSLRL SCAASGFTFS KYAMIWVRQA PGKGLEWVSW IPPSGGYTSY | 60 |
| ADSVKGRFTI SRDNSKNTLY LQMNSLRAED TAVYYCAKDR AYGDYVGWNG FDYWGQGTLV | 120 |
| TVSS | 124 |
| LC for Fab M272-F08 | |
| (SEQ ID NO: 564) | |
| QDIQMTQSPA TLSLSPGERA TLSCRASQSI SSFLAWYQQK PGQAPRLLIY DASYRATGIP | 60 |
| ARFSGSGSGT DFTLTISSLE PEDYAVYYCQ QRGNWPITFG QGTRLEIK | 108 |
| HC for Fab M272-F08 | |
| (SEQ ID NO: 565) | |
| EVQLLESGGG LVQPGGSLRL SCAASGFTFS KYAMIWVRQA PGKGLEWVSY ISPSGGFTGY | 60 |
| ADSVKGRFTI SRDNSKNTLY LQMNSLRAED TAVYYCAKDR AYGDYVGWNG FDYWGQGTLV | 120 |
| TVSS | 124 |
| LC for Fab M270-G12 | |
| (SEQ ID NO: 566) | |
| QDIQMTQSPA TLSLSPGERA TLSCRASQSI SSFLAWYQQK PGQAPRLLIY DASYRATGIP | 60 |
| ARFSGSGSGT DFTLTISSLE PEDYAVYYCQ QRGNWPITFG QGTRLEIK | 108 |
| HC for Fab M270-G12 | |
| (SEQ ID NO: 567) | |
| EVQLLESGGG LVQPGGSLRL SCAASGFTFS KYAMIWVRQS PGKGLEWVSY ISSSGGFTDY | 60 |
| ADSVKGRFTI SRDNSKNTLY LQMNSLRAED TAVYYCAKDR AYGDYVGWNG FDYWGQGTLV | 120 |
| TVSS | 124 |
| LC for Fab M274-H05 | |
| (SEQ ID NO: 568) | |
| QDIQMTQSPA TLSLSPGERA TLSCRASQSI SSFLAWYQQK PGQAPRLLIY DASYRATGIP | 60 |
| ARFSGSGSGT DFTLTISSLE PEDYAVYYCQ QRGNWPITFG QGTRLEIK | 108 |
| HC for Fab M274-H05 | |
| (SEQ ID NO: 569) | |
| EVQLLESGGG LVQPGGSLRL SCAASGFTFS KYAMWWVRQA PGKGLEWVSS ISPSGGGTFY | 60 |
| ADSVKGRFTI SRDNSKNTLY LQMNSLRAED TAVYYCAKDR AYGDYVGWNG FDYWGQGTLV | 120 |
| TVSS | 124 |
| LC for Fab M271-F05 | |
| (SEQ ID NO: 570) | |
| QDIQMTQSPA TLSLSPGERA TLSCRASQSI SSFLAWYQQK PGQAPRLLIY DASYRATGIP | 60 |
| ARFSGSGSGT DFTLTISSLE PEDYAVYYCQ QRGNWPITFG QGTRLEIK | 108 |
| HC for Fab M271-F05 | |
| (SEQ ID NO: 571) | |
| EVQLLESGGG LVQPGGSLRL SCAASGFTFS KYAMWWVRQA PGKGLEWVSY IVPSGGRTFY | 60 |
| ADSVKGRFTI SRDNSKNTLY LQMNSLRAED TAVYYCAKDR AYGDYVGWNG FDYWGQGTLV | 120 |
| TVSS | 124 |
| LC for Fab M273-H08 | |
| (SEQ ID NO: 572) | |
| QDIQMTQSPA TLSLSPGERA TLSCRASQSI SSFLAWYQQK PGQAPRLLIY DASYRATGIP | 60 |
| ARFSGSGSGT DFTLTISSLE PEDYAVYYCQ QRGNWPITFG QGTRLEIK | 108 |
| HC for Fab M273-H08 | |
| (SEQ ID NO: 573) | |
| EVQLLESGGG LVQPGGSLRL SCAASGFTFS KYDMFWVRQA PGKGLEWVSS IVPSGGATYY | 60 |
| ADSVKGRFTI SRDNSKNTLY LQMNSLRAED TAVYYCAKDR AYGDYVGWNG FDYWGQGTLV | 120 |
| TVSS | 124 |
| LC for Fab M271-H02 | |
| (SEQ ID NO: 574) | |
| QDIQMTQSPA TLSLSPGERA TLSCRASQSI SSFLAWYQQK PGQAPRLLIY DASYRATGIP | 60 |
| ARFSGSGSGT DFTLTISSLE PEDYAVYYCQ QRGNWPITFG QGTRLEIK | 108 |
| HC for Fab M271-H02 | |
| (SEQ ID NO: 575) | |
| EVQLLESGGG LVQPGGSLRL SCAASGFTFS KYDMIWVRQA PGKGLEWVSW IGPSGGATMY | 60 |
| ADSVKGRFTI SRDNSKNTLY LQMNSLRAED TAVYYCAKDR AYGDYVGWNG FDYWGQGTLV | 120 |
| TVSS | 124 |
| LC for Fab M306-A12 | |
| (SEQ ID NO: 576) | |
| QDIQMTQSPA TLSLSPGERA TLSCRASQSI SSFLAWYQQK PGQAPRLLIY DASYRATGIP | 60 |
| ARFSGSGSGT DFTLTISSLE PEDYAVYYCQ QRGNWPITFG QGTRLEIK | 108 |
| HC for Fab M306-A12 | |
| (SEQ ID NO: 577) | |
| EVQLLESGGG LVQPGGSLRL SCAASGFTFS KYDMIWVRQA PGKGLEWVSY IGSSGGYTGY | 60 |
| ADSVKGRFTI SRDNSKNTLY LQMNSLRAED TAVYYCAKDR AYGDYVGWNG FDYWGQGTLV | 120 |
| TVSS | 124 |
| LC for Fab M271-B06 | |
| (SEQ ID NO: 578) | |
| QDIQMTQSPA TLSLSPGERA TLSCRASQSI SSFLAWYQQK PGQAPRLLIY DASYRATGIP | 60 |
| ARFSGSGSGT DFTLTISSLE PEDYAVYYCQ QRGNWPITFG QGTRLEIK | 108 |
| HC for Fab M271-B06 | |
| (SEQ ID NO: 579) | |
| EVQLLESGGG LVQPGGSLRL SCAASGFTFS KYDMWWVRQA PGKGLEWVSS ISSSGGGTFY | 60 |
| ADSVKGRFTI SRDNSKNTLY LQMNSLRAED TAVYYCAKDR AYGDYVGWNG FDYWGQGTLV | 120 |
| TVSS | 124 |
| LC for Fab M271-D01 | |
| (SEQ ID NO: 580) | |
| QDIQMTQSPA TLSLSPGERA TLSCRASQSI SSFLAWYQQK PGQAPRLLIY DASYRATGIP | 60 |
| ARFSGSGSGT DFTLTISSLE PEDYAVYYCQ QRGNWPITFG QGTRLEIK | 108 |
| HC for Fab M271-D01 | |
| (SEQ ID NO: 581) | |
| EVQLLESGGG LVQPGGSLRL SCAASGFTFS KYDMWWVRQA PGKGLEWVSV IYPSGGPTFY | 60 |
| ADSVKGRFTI SRDNSKNTLY LQMNSLRAED TAVYYCAKDR AYGDYVGWNG FDYWGQGTLV | 120 |
| TVSS | 124 |
| LC for Fab M269-H03 | |
| (SEQ ID NO: 582) | |
| QDIQMTQSPA TLSLSPGERA TLSCRASQSI SSFLAWYQQK PGQAPRLLIY DASYRATGIP | 60 |
| ARFSGSGSGT DFTLTISSLE PEDYAVYYCQ QRGNWPITFG QGTRLEIK | 108 |
| HC for Fab M269-H03 | |
| (SEQ ID NO: 583) | |
| EVQLLESGGG LVQPGGSLRL SCAASGFTFS KYDMWWVRQA PGKGLEWVSV IYPSGGQTYY | 60 |
| ADSVKGRFTI SRDNSKNTLY LQMNSLRAED TAVYYCAKDR AYGDYVGWNG FDYWGQGTLV | 120 |
| TVSS | 124 |
| LC for Fab M274-E01 | |
| (SEQ ID NO: 584) | |
| QDIQMTQSPA TLSLSPGERA TLSCRASQSI SSFLAWYQQK PGQAPRLLIY DASYRATGIP | 60 |
| ARFSGSGSGT DFTLTISSLE PEDYAVYYCQ QRGNWPITFG QGTRLEIK | 108 |
| HC for Fab M274-E01 | |
| (SEQ ID NO: 585) | |
| EVQLLESGGG LVQPGGSLRL SCAASGFTFS KYDMWWVRQA PGKGLEWVSV IYPSGGSTYY | 60 |
| ADSVKGRFTI SRDNSKNTLY LQMNSLRAED TAVYYCAKDR AYGDYVGWNG FDYWGQGTLV | 120 |
| TVSS | 124 |
| LC for Fab M275-B12 | |
| (SEQ ID NO: 586) | |
| QDIQMTQSPA TLSLSPGERA TLSCRASQSI SSFLAWYQQK PGQAPRLLIY DASYRATGIP | 60 |
| ARFSGSGSGT DFTLTISSLE PEDYAVYYCQ QRGNWPITFG QGTRLEIK | 108 |
| HC for Fab M275-B12 | |
| (SEQ ID NO: 587) | |
| EVQLLESGGG LVQPGGSLRL SCAASGFTFS KYDMWWVRQA PGKGLEWVSV IYSSGGFTLY | 60 |
| ADSVKGRFTI SRDNSKNTLY LQMNSLRAED TAVYYCAKDR AYGDYVGWNG FDYWGQGTLV | 120 |
| TVSS | 124 |
| LC for Fab M270-H06 | |
| (SEQ ID NO: 588) | |
| QDIQMTQSPA TLSLSPGERA TLSCRASQSI SSFLAWYQQK PGQAPRLLIY DASYRATGIP | 60 |
| ARFSGSGSGT DFTLTISSLE PEDYAVYYCQ QRGNWPITFG QGTRLEIK | 108 |
| HC for Fab M270-H06 | |
| (SEQ ID NO: 589) | |
| EVQLLESGGG LVQPGGSLRL SCAASGFTFS KYDMWWVRQA PGKGLEWVSV IYSSGGFTSY | 60 |
| ADSVKGRFTI SRDNSKNTLY LQMNSLRAED TAVYYCAKDR AYGDYVGWNG FDYWGQGTLV | 120 |
| TVSS | 124 |
| LC for Fab M271-A04 | |
| (SEQ ID NO: 590) | |
| QDIQMTQSPA TLSLSPGERA TLSCRASQSI SSFLAWYQQK PGQAPRLLIY DASYRATGIP | 60 |
| ARFSGSGSGT DFTLTISSLE PEDYAVYYCQ QRGNWPITFG QGTRLEIK | 108 |
| HC for Fab M271-A04 | |
| (SEQ ID NO: 591) | |
| EVQLLESGGG LVQPGGSLRL SCAASGFTFS KYDMWWVRQA PGKGLEWVSV IYSSGGPTFY | 60 |
| ADSVKGRFTI SRDNSKNTLY LQMNSLRAED TAVYYCAKDR AYGDYVGWNG FDYWGQGTLV | 120 |
| TVSS | 124 |
| LC for Fab M272-C09 | |
| (SEQ ID NO: 592) | |
| QDIQMTQSPA TLSLSPGERA TLSCRASQSI SSFLAWYQQK PGQAPRLLIY DASYRATGIP | 60 |
| ARFSGSGSGT DFTLTISSLE PEDYAVYYCQ QRGNWPITFG QGTRLEIK | 108 |
| HC for Fab M272-C09 | |
| (SEQ ID NO: 593) | |
| EVQLLESGGG LVQPGGSLRL SCAASGFTFS KYDMWWVRQA PGKGLEWVSY IGPSGGFTDY | 60 |
| ADSVKGRFTI SRDNSKNTLY LQMNSLRAED TAVYYCAKDR AYGDYVGWNG FDYWGQGTLV | 120 |
| TVSS | 124 |
| LC for Fab M274-G09 | |
| (SEQ ID NO: 594) | |
| QDIQMTQSPA TLSLSPGERA TLSCRASQSI SSFLAWYQQK PGQAPRLLIY DASYRATGIP | 60 |
| ARFSGSGSGT DFTLTISSLE PEDYAVYYCQ QRGNWPITFG QGTRLEIK | 108 |
| HC for Fab M274-G09 | |
| (SEQ ID NO: 595) | |
| EVQLLESGGG LVQPGGSLRL SCAASGFTFS KYDMWWVRQA PGKGLEWVSY ISSSGGFTDY | 60 |
| ADSVKGRFTI SRDNSKNTLY LQMNSLRAED TAVYYCAKDR AYGDYVGWNG FDYWGQGTLV | 120 |
| TVSS | 124 |
| LC for Fab M299-F05 | |
| (SEQ ID NO: 596) | |
| QDIQMTQSPA TLSLSPGERA TLSCRASQSI SSFLAWYQQK PGQAPRLLIY DASYRATGIP | 60 |
| ARFSGSGSGT DFTLTISSLE PEDYAVYYCQ QRGNWPITFG QGTRLEIK | 108 |
| HC for Fab M299-F05 | |
| (SEQ ID NO: 597) | |
| EVQLLESGGG LVQPGGSLRL SCAASGFTFS KYDMWWVRQA PGKGLEWVSY IVPSGGFIDY | 60 |
| ADSVKGRFTI SRDNSKNTLY LQMNSLRAED TAVYYCAKDR AYGDYVGWNG FDYWGQGTLV | 120 |
| TVSS | 124 |
| LC for Fab M275-B05 | |
| (SEQ ID NO: 598) | |
| QDIQMTQSPA TLSLSPGERA TLSCRASQSI SSFLAWYQQK PGQAPRLLIY DASYRATGIP | 60 |
| ARFSGSGSGT DFTLTISSLE PEDYAVYYCQ QRGNWPITFG QGTRLEIK | 108 |
| HC for Fab M275-B05 | |
| (SEQ ID NO: 599) | |
| EVQLLESGGG LVQPGGSLRL SCAASGFTFS KYEMFWVRQA PGKGLEWVSS ISSSGGGTFY | 60 |
| ADSVKGRFTI SRDNSKNTLY LQMNSLRAED TAVYYCAKDR AYGDYVGWNG FDYWGQGTLV | 120 |
| TVSS | 124 |
| LC for Fab M271-H04 | |
| (SEQ ID NO: 600) | |
| QDIQMTQSPA TLSLSPGERA TLSCRASQSI SSFLAWYQQK PGQAPRLLIY DASYRATGIP | 60 |
| ARFSGSGSGT DFTLTISSLE PEDYAVYYCQ QRGNWPITFG QGTRLEIK | 108 |
| HC for Fab M271-H04 | |
| (SEQ ID NO: 601) | |
| EVQLLESGGG LVQPGGSLRL SCAASGFTFS KYEMWWVRQA PGKGLEWVSV IYPSGGMTYY | 60 |
| ADSVKGRFTI SRDNSKNTLY LQMNSLRAED TAVYYCAKDR AYGDYVGWNG FDYWGQGTLV | 120 |
| TVSS | 124 |
| LC for Fab M277-D11 | |
| (SEQ ID NO: 602) | |
| QDIQMTQSPA TLSLSPGERA TLSCRASQSI SSFLAWYQQK PGQAPRLLIY DASYRATGIP | 60 |
| ARFSGSGSGT DFTLTISSLE PEDYAVYYCQ QRGNWPITFG QGTRLEIK | 108 |
| HC for Fab M277-D11 | |
| (SEQ ID NO: 603) | |
| EVQLLESGGG LVQPGGSLRL SCAASGFTFS KYEMWWVRQA PGKGLEWVSV IYPSGGYTGY | 60 |
| ADSVKGRFTI SRDNSKNTLY LQMNSLRAED TAVYYCAKDR AYGDYVGWNG FDYWGQGTLV | 120 |
| TVSS | 124 |
| LC for Fab M268-B02 | |
| (SEQ ID NO: 604) | |
| QDIQMTQSPA TLSLSPGERA TLSCRASQSI SSFLAWYQQK PGQAPRLLIY DASYRATGIP | 60 |
| ARFSGSGSGT DFTLTISSLE PEDYAVYYCQ QRGNWPITFG QGTRLEIK | 108 |
| HC for Fab M268-B02 | |
| (SEQ ID NO: 605) | |
| EVQLLESGGG LVQPGGSLRL SCAASGFTFS KYEMWWVRQA PGKGLEWVSV IYSSGGKTYY | 60 |
| ADSVKGRFTI SRDNSKNTLY LQMNSLRAED TAVYYCAKDR AYGDYVGWNG FDYWGQGTLV | 120 |
| TVSS | 124 |
| LC for Fab M275-E04 | |
| (SEQ ID NO: 606) | |
| QDIQMTQSPA TLSLSPGERA TLSCRASQSI SSFLAWYQQK PGQAPRLLIY DASYRATGIP | 60 |
| ARFSGSGSGT DFTLTISSLE PEDYAVYYCQ QRGNWPITFG QGTRLEIK | 108 |
| HC for Fab M275-E04 | |
| (SEQ ID NO: 607) | |
| EVQLLESGGG LVQPGGSLRL SCAASGFTFS KYEMWWVRQA PGKGLEWVSY IGPSGGFTDY | 60 |
| ADSVKGRFTI SRDNSKNTLY LQMNSLRAED TAVYYCAKDR AYGDYVGWNG FDYWGQGTLV | 120 |
| TVSS | 124 |
| LC for Fab M275-D12 | |
| (SEQ ID NO: 608) | |
| QDIQMTQSPA TLSLSPGERA TLSCRASQSI SSFLAWYQQK PGQAPRLLIY DASYRATGIP | 60 |
| ARFSGSGSGT DFTLTISSLE PEDYAVYYCQ QRGNWPITFG QGTRLEIK | 108 |
| HC for Fab M275-D12 | |
| (SEQ ID NO: 609) | |
| EVQLLESGGG LVQPGGSLRL SCAASGFTFS KYEMWWVRQA PGKGLEWVSY IGPSGGITMY | 60 |
| ADSVKGRFTI SRDNSKNTLY LQMNSLRAED TAVYYCAKDR AYGDYVGWNG FDYWGQGTLV | 120 |
| TVSS | 124 |
| LC for Fab M270-A02 | |
| (SEQ ID NO: 610) | |
| QDIQMTQSPA TLSLSPGERA TLSCRASQSI SSFLAWYQQK PGQAPRLLIY DASYRATGIP | 60 |
| ARFSGSGSGT DFTLTISSLE PEDYAVYYCQ QRGNWPITFG QGTRLEIK | 108 |
| HC for Fab M270-A02 | |
| (SEQ ID NO: 611) | |
| EVQLLESGGG LVQPGGSLRL SCAASGFTFS KYEMWWVRQA PGKGLEWVSY ISPSGGGTLY | 60 |
| ADSVKGRFTI SRDNSKNTLY LQMNSLRAED TAVYYCAKDR AYGDYVGWNG FDYWGQGTLV | 120 |
| TVSS | 124 |
| LC for Fab M277-F09 | |
| (SEQ ID NO: 612) | |
| QDIQMTQSPA TLSLSPGERA TLSCRASQSI SSFLAWYQQK PGQAPRLLIY DASYRATGIP | 60 |
| ARFSGSGSGT DFTLTISSLE PEDYAVYYCQ QRGNWPITFG QGTRLEIK | 108 |
| HC for Fab M277-F09 | |
| (SEQ ID NO: 613) | |
| EVQLLESGGG LVQPGGSLRL SCAASGFTFS KYMMFWVRQA PGKGLEWVSS IYSSGGRTFY | 60 |
| ADSVKGRFTI SRDNSKNTLY LQMNSLRAED TAVYYCAKDR AYGDYVGWNG FDYWGQGTLV | 120 |
| TVSS | 124 |
| LC for Fab M269-G12 | |
| (SEQ ID NO: 614) | |
| QDIQMTQSPA TLSLSPGERA TLSCRASQSI SSFLAWYQQK PGQAPRLLIY DASYRATGIP | 60 |
| ARFSGSGSGT DFTLTISSLE PEDYAVYYCQ QRGNWPITFG QGTRLEIK | 108 |
| HC for Fab M269-G12 | |
| (SEQ ID NO: 615) | |
| EVQLLESGGG LVQPGGSLRL SCAASGFTFS KYNMWWVRQA PGKGLEWVSS IYPSGGATFY | 60 |
| ADSVKGRFTI SRDNSKNTLY LQMNSLRAED TAVYYCAKDR AYGDYVGWNG FDYWGQGTLV | 120 |
| TVSS | 124 |
| LC for Fab M273-G04 | |
| (SEQ ID NO: 616) | |
| QDIQMTQSPA TLSLSPGERA TLSCRASQSI SSFLAWYQQK PGQAPRLLIY DASYRATGIP | 60 |
| ARFSGSGSGT DFTLTISSLE PEDYAVYYCQ QRGNWPITFG QGTRLEIK | 108 |
| HC for Fab M273-G04 | |
| (SEQ ID NO: 617) | |
| EVQLLESGGG LVQPGGSLRL SCAASGFTFS KYNMWWVRQA PGKGLEWVSV IYPSGGATFY | 60 |
| ADSVKGRFTI SRDNSKNTLY LQMNSLRAED TAVYYCAKDR AYGDYVGWNG FDYWGQGTLV | 120 |
| TVSS | 124 |
| LC for Fab M269-G04 | |
| (SEQ ID NO: 618) | |
| QDIQMTQSPA TLSLSPGERA TLSCRASQSI SSFLAWYQQK PGQAPRLLIY DASYRATGIP | 60 |
| ARFSGSGSGT DFTLTISSLE PEDYAVYYCQ QRGNWPITFG QGTRLEIK | 108 |
| HC for Fab M269-G04 | |
| (SEQ ID NO: 619) | |
| EVQLLESGGG LVQPGGSLRL SCAASGFTFS KYPMFWVRQA PGKGLEWVSY IVPSGGYTSY | 60 |
| ADSVKGRFTI SRDNSKNTLY LQMNSLRAED TAVYYCAKDR AYGDYVGWNG FDYWGQGTLV | 120 |
| TVSS | 124 |
| LC for Fab M269-B01 | |
| (SEQ ID NO: 620) | |
| QDIQMTQSPA TLSLSPGERA TLSCRASQSI SSFLAWYQQK PGQAPRLLIY DASYRATGIP | 60 |
| ARFSGSGSGT DFTLTISSLE PEDYAVYYCQ QRGNWPITFG QGTRLEIK | 108 |
| HC for Fab M269-B01 | |
| (SEQ ID NO: 621) | |
| EVQLLESGGG LVQPGGSLRL SCAASGFTFS KYPMIWVRQA PGKGLEWVSY ISPSGGYTGY | 60 |
| ADSVKGRFTI SRDNSKNTLY LQMNSLRAED TAVYYCAKDR AYGDYVGWNG FDYWGQGTLV | 120 |
| TVSS | 124 |
| LC for Fab M268-B06 | |
| (SEQ ID NO: 622) | |
| QDIQMTQSPA TLSLSPGERA TLSCRASQSI SSFLAWYQQK PGQAPRLLIY DASYRATGIP | 60 |
| ARFSGSGSGT DFTLTISSLE PEDYAVYYCQ QRGNWPITFG QGTRLEIK | 108 |
| HC for Fab M268-B06 | |
| (SEQ ID NO: 623) | |
| EVQLLESGGG LVQPGGSLRL SCAASGFTFS KYPMIWVRQA PGKGLEWVSY ISPSGGYTSY | 60 |
| ADSVKGRFTI SRDNSKNTLY LQMNSLRAED TAVYYCAKDR AYGDYVGWNG FDYWGQGTLV | 120 |
| TVSS | 124 |
| LC for Fab M272-A11 | |
| (SEQ ID NO: 624) | |
| QDIQMTQSPA TLSLSPGERA TLSCRASQSI SSFLAWYQQK PGQAPRLLIY DASYRATGIP | 60 |
| ARFSGSGSGT DFTLTISSLE PEDYAVYYCQ QRGNWPITFG QGTRLEIK | 108 |
| HC for Fab M272-A11 | |
| (SEQ ID NO: 625) | |
| EVQLLESGGG LVQPGGSLRL SCAASGFTFS KYPMIWVRQA PGKGLEWVSY ISSSGGWTDY | 60 |
| ADSVKGRFTI SRDNSKNTLY LQMNSLRAED TAVYYCAKDR AYGDYVGWNG FDYWGQGTLV | 120 |
| TVSS | 124 |
| LC for Fab M274-H02 | |
| (SEQ ID NO: 626) | |
| QDIQMTQSPA TLSLSPGERA TLSCRASQSI SSFLAWYQQK PGQAPRLLIY DASYRATGIP | 60 |
| ARFSGSGSGT DFTLTISSLE PEDYAVYYCQ QRGNWPITFG QGTRLEIK | 108 |
| HC for Fab M274-H02 | |
| (SEQ ID NO: 627) | |
| EVQLLESGGG LVQPGGSLRL SCAASGFTFS KYPMIWVRQA PGKGLEWVSY IYPSGGATYY | 60 |
| ADSVKGRFTI SRDNSKNTLY LQMNSLRAED TAVYYCAKDR AYGDYVGWNG FDYWGQGTLV | 120 |
| TVSS | 124 |
| LC for Fab M275-C12 | |
| (SEQ ID NO: 628) | |
| QDIQMTQSPA TLSLSPGERA TLSCRASQSI SSFLAWYQQK PGQAPRLLIY DASYRATGIP | 60 |
| ARFSGSGSGT DFTLTISSLE PEDYAVYYCQ QRGNWPITFG QGTRLEIK | 108 |
| HC for Fab M275-C12 | |
| (SEQ ID NO: 629) | |
| EVQLLESGGG LVQPGGSLRL SCAASGFTFS KYPMIWVRQA PGKGLEWVSY IYPSGGYTSY | 60 |
| ADSVKGRFTI SRDNSKNTLY LQMNSLRAED TAVYYCAKDR AYGDYVGWNG FDYWGQGTLV | 120 |
| TVSS | 124 |
| LC for Fab M268-G12 | |
| (SEQ ID NO: 630) | |
| QDIQMTQSPA TLSLSPGERA TLSCRASQSI SSFLAWYQQK PGQAPRLLIY DASYRATGIP | 60 |
| ARFSGSGSGT DFTLTISSLE PEDYAVYYCQ QRGNWPITFG QGTRLEIK | 108 |
| HC for Fab M268-G12 | |
| (SEQ ID NO: 631) | |
| EVQLLESGGG LVQPGGSLRL SCAASGFTFS KYPMIWVRQA PGKGLEWVSY IYSSGGGTYY | 60 |
| ADSVKGRFTI SRDNSKNTLY LQMNSLRAED TAVYYCAKDR AYGDYVGWNG FDYWGQGTLV | 120 |
| TVSS | 124 |
| LC for Fab M271-C02 | |
| (SEQ ID NO: 632) | |
| QDIQMTQSPA TLSLSPGERA TLSCRASQSI SSFLAWYQQK PGQAPRLLIY DASYRATGIP | 60 |
| ARFSGSGSGT DFTLTISSLE PEDYAVYYCQ QRGNWPITFG QGTRLEIK | 108 |
| HC for Fab M271-C02 | |
| (SEQ ID NO: 633) | |
| EVQLLESGGG LVQPGGSLRL SCAASGFTFS KYPMMWVRQA PGKGLEWVSY ISPSGGFTDY | 60 |
| ADSVKGRFTI SRDNSKNTLY LQMNSLRAED TAVYYCAKDR AYGDYVGWNG FDYWGQGTLV | 120 |
| TVSS | 124 |
| LC for Fab M268-E09 | |
| (SEQ ID NO: 634) | |
| QDIQMTQSPA TLSLSPGERA TLSCRASQSI SSFLAWYQQK PGQAPRLLIY DASYRATGIP | 60 |
| ARFSGSGSGT DFTLTISSLE PEDYAVYYCQ QRGNWPITFG QGTRLEIK | 108 |
| HC for Fab M268-E09 | |
| (SEQ ID NO: 635) | |
| EVQLLESGGG LVQPGGSLRL SCAASGFTFS KYPMMWVRQA PGKGLEWVSY IYPSGGYTDY | 60 |
| ADSVKGRFTI SRDNSKNTLY LQMNSLRAED TAVYYCAKDR AYGDYVGWNG FDYWGQGTLV | 120 |
| TVSS | 124 |
| LC for Fab M274-F09 | |
| (SEQ ID NO: 636) | |
| QDIQMTQSPA TLSLSPGERA TLSCRASQSI SSFLAWYQQK PGQAPRLLIY DASYRATGIP | 60 |
| ARFSGSGSGT DFTLTISSLE PEDYAVYYCQ QRGNWPITFG QGTRLEIK | 108 |
| HC for Fab M274-F09 | |
| (SEQ ID NO: 637) | |
| EVQLLESGGG LVQPGGSLRL SCAASGFTFS KYPMMWVRQA PGKGLEWVSY IYPSGGYTGY | 60 |
| ADSVKGRFTI SRDNSKNTLY LQMNSLRAED TAVYYCAKDR AYGDYVGWNG FDYWGQGTLV | 120 |
| TVSS | 124 |
| LC for Fab M271-F02 | |
| (SEQ ID NO: 638) | |
| QDIQMTQSPA TLSLSPGERA TLSCRASQSI SSFLAWYQQK PGQAPRLLIY DASYRATGIP | 60 |
| ARFSGSGSGT DFTLTISSLE PEDYAVYYCQ QRGNWPITFG QGTRLEIK | 108 |
| HC for Fab M271-F02 | |
| (SEQ ID NO: 639) | |
| EVQLLESGGG LVQPGGSLRL SCAASGFTFS KYPMWWVRQA PGKGLEWVSS IVSSGGATYY | 60 |
| TDSVKGRFTI SRDNSKNTLY LQMNSLRAED TAVYYCAKDR AYGDYVGWNG FDYWGQGTLV | 120 |
| TVSS | 124 |
| LC for Fab M276-B12 | |
| (SEQ ID NO: 640) | |
| QDIQMTQSPA TLSLSPGERA TLSCRASQSI SSFLAWYQQK PGQAPRLLIY DASYRATGIP | 60 |
| ARFSGSGSGT DFTLTISSLE PEDYAVYYCQ QRGNWPITFG QGTRLEIK | 108 |
| HC for Fab M276-B12 | |
| (SEQ ID NO: 641) | |
| EVQLLESGGG LVQPGGSLRL SCAASGFTFS KYPMWWVRQA PGKGLEWVSS IYPSGGYTGY | 60 |
| ADSVKGRFTI SRDNSKNTLY LQMNSLRAED TAVYYCAKDR AYGDYVGWNG FDYWGQGTLV | 120 |
| TVSS | 124 |
| LC for Fab M272-H09 | |
| (SEQ ID NO: 642) | |
| QDIQMTQSPA TLSLSPGERA TLSCRASQSI SSFLAWYQQK PGQAPRLLIY DASYRATGIP | 60 |
| ARFSGSGSGT DFTLTISSLE PEDYAVYYCQ QRGNWPITFG QGTRLEIK | 108 |
| HC for Fab M272-H09 | |
| (SEQ ID NO: 643) | |
| EVQLLESGGG LVQPGGSLRL SCAASGFTFS KYPMWWVRQA PGKGLEWVSV ISPSGGATYY | 60 |
| ADSVKGRFTI SRDNSKNTLY LQMNSLRAED TAVYYCAKDR AYGDYVGWNG FDYWGQGTLV | 120 |
| TVSS | 124 |
| LC for Fab M272-G02 | |
| (SEQ ID NO: 644) | |
| QDIQMTQSPA TLSLSPGERA TLSCRASQSI SSFLAWYQQK PGQAPRLLIY DASYRATGIP | 60 |
| ARFSGSGSGT DFTLTISSLE PEDYAVYYCQ QRGNWPITFG QGTRLEIK | 108 |
| HC for Fab M272-G02 | |
| (SEQ ID NO: 645) | |
| EVQLLESGGG LVQPGGSLRL SCAASGFTFS KYPMWWVRQA PGKGLEWVSV IYPSGGYTAY | 60 |
| ADSVKGRFTI SRDNSKNTLY LQMNSLRAED TAVYYCAKDR AYGDYVGWNG FDYWGQGTLV | 120 |
| TVSS | 124 |
| LC for Fab M274-E04 | |
| (SEQ ID NO: 646) | |
| QDIQMTQSPA TLSLSPGERA TLSCRASQSI SSFLAWYQQK PGQAPRLLIY DASYRATGIP | 60 |
| ARFSGSGSGT DFTLTISSLE PEDYAVYYCQ QRGNWPITFG QGTRLEIK | 108 |
| HC for Fab M274-E04 | |
| (SEQ ID NO: 647) | |
| EVQLLESGGG LVQPGGSLRL SCAASGFTFS KYPMWWVRQA PGKGLEWVSV IYSSGGGTFY | 60 |
| ADSVKGRFTI SRDNSKNTLY LQMNSLRAED TAVYYCAKDR AYGDYVGWNG FDYWGQGTLV | 120 |
| TVSS | 124 |
| LC for Fab M303-B07 | |
| (SEQ ID NO: 648) | |
| QDIQMTQSPA TLSLSPGERA TLSCRASQSI SSFLAWYQQK PGQAPRLLIY DASYRATGIP | 60 |
| ARFSGSGSGT DFTLTISSLE PEDYAVYYCQ QRGNWPITFG QGTRLEIK | 108 |
| HC for Fab M303-B07 | |
| (SEQ ID NO: 649) | |
| EVQLLESGGG LVQPGGSLRL SCAASGFTFS KYPMWWVRQA PGKGLEWVSY ISPSGGGTLY | 60 |
| ADSVKGRFTI SRDNSKNTLY LQMNSLRAED TAVYYCAKDR AYGDYVGWNG FDYWGQGTLV | 120 |
| TVSS | 124 |
| LC for Fab M275-D06 | |
| (SEQ ID NO: 650) | |
| QDIQMTQSPA TLSLSPGERA TLSCRASQSI SSFLAWYQQK PGQAPRLLIY DASYRATGIP | 60 |
| ARFSGSGSGT DFTLTISSLE PEDYAVYYCQ QRGNWPITFG QGTRLEIK | 108 |
| HC for Fab M275-D06 | |
| (SEQ ID NO: 651) | |
| EVQLLESGGG LVQPGGSLRL SCAASGFTFS KYPMWWVRQA PGKGLEWVSY ISPSGGGTYY | 60 |
| ADSVKGRFTI SRDNSKNTLY LQMNSLRAED TAVYYCAKDR AYGDYVGWNG FDYWGQGTLV | 120 |
| TVSS | 124 |
| LC for Fab M271-D04 | |
| (SEQ ID NO: 652) | |
| QDIQMTQSPA TLSLSPGERA TLSCRASQSI SSFLAWYQQK PGQAPRLLIY DASYRATGIP | 60 |
| ARFSGSGSGT DFTLTISSLE PEDYAVYYCQ QRGNWPITFG QGTRLEIK | 108 |
| HC for Fab M271-D04 | |
| (SEQ ID NO: 653) | |
| EVQLLESGGG LVQPGGSLRL SCAASGFTFS KYPMWWVRQA PGKGLEWVSY ISSSGGGTYY | 60 |
| ADSVKGRFTI SRDNSKNTLY LQMNSLRAED TAVYYCAKDR AYGDYVGWNG FDYWGQGTLV | 120 |
| TVSS | 124 |
| LC for Fab M268-H03 | |
| (SEQ ID NO: 654) | |
| QDIQMTQSPA TLSLSPGERA TLSCRASQSI SSFLAWYQQK PGQAPRLLIY DASYRATGIP | 60 |
| ARFSGSGSGT DFTLTISSLE PEDYAVYYCQ QRGNWPITFG QGTRLEIK | 108 |
| HC for Fab M268-H03 | |
| (SEQ ID NO: 655) | |
| EVQLLESGGG LVQPGGSLRL SCAASGFTFS KYPMWWVRQA PGKGLEWVSY IVPSGGATFY | 60 |
| ADSVKGRFTI SRDNSKNTLY LQMNSLRAED TAVYYCAKDR AYGDYVGWNG FDYWGQGTLV | 120 |
| TVSS | 124 |
| LC for Fab M272-A03 | |
| (SEQ ID NO: 656) | |
| QDIQMTQSPA TLSLSPGERA TLSCRASQSI SSFLAWYQQK PGQAPRLLIY DASYRATGIP | 60 |
| ARFSGSGSGT DFTLTISSLE PEDYAVYYCQ QRGNWPITFG QGTRLEIK | 108 |
| HC for Fab M272-A03 | |
| (SEQ ID NO: 657) | |
| EVQLLESGGG LVQPGGSLRL SCAASGFTFS KYPMWWVRQA PGKGLEWVSY IVPSGGPTWY | 60 |
| ADSVKGRFTI SRDNSKNTLY LQMNSLRAED TAVYYCAKDR AYGDYVGWNG FDYWGQGTLV | 120 |
| TVSS | 124 |
| LC for Fab M274-G07 | |
| (SEQ ID NO: 658) | |
| QDIQMTQSPA TLSLSPGERA TLSCRASQSI SSFLAWYQQK PGQAPRLLIY DASYRATGIP | 60 |
| ARFSGSGSGT DFTLTISSLE PEDYAVYYCQ QRGNWPITFG QGTRLEIK | 108 |
| HC for Fab M274-G07 | |
| (SEQ ID NO: 659) | |
| EVQLLESGGG LVQPGGSLRL SCAASGFTFS KYPMWWVRQA PGKGLEWVSY IVPSGGWTAY | 60 |
| ADSVKGRFTI SRDNSKNTLY LQMNSLRAED TAVYYCAKDR AYGDYVGWNG FDYWGQGTLV | 120 |
| TVSS | 124 |
| LC for Fab M270-E01 | |
| (SEQ ID NO: 660) | |
| QDIQMTQSPA TLSLSPGERA TLSCRASQSI SSFLAWYQQK PGQAPRLLIY DASYRATGIP | 60 |
| ARFSGSGSGT DFTLTISSLE PEDYAVYYCQ QRGNWPITFG QGTRLEIK | 108 |
| HC for Fab M270-E01 | |
| (SEQ ID NO: 661) | |
| EVQLLESGGG LVQPGGSLRL SCAASGFTFS KYQMWWVRQA PGKGLEWVSS IYPSGGATFY | 60 |
| ADSVKGRFTI SRDNSKNTLY LQMNSLRAED TAVYYCAKDR AYGDYVGWNG FDYWGQGTLV | 120 |
| TVSS | 124 |
| LC for Fab M270-G09 | |
| (SEQ ID NO: 662) | |
| QDIQMTQSPA TLSLSPGERA TLSCRASQSI SSFLAWYQQK PGQAPRLLIY DASYRATGIP | 60 |
| ARFSGSGSGT DFTLTISSLE PEDYAVYYCQ QRGNWPITFG QGTRLEIK | 108 |
| HC for Fab M270-G09 | |
| (SEQ ID NO: 663) | |
| EVQLLESGGG LVQPGGSLRL SCAASGFTFS KYQMWWVRQA PGKGLEWVSS IYPSGGGTFY | 60 |
| ADSVKGRFTI SRDNSKNTLY LQMNSLRAED TAVYYCAKDR AYGDYVGWNG FDYWGQGTLV | 120 |
| TVSS | 124 |
| LC for Fab M272-B11 | |
| (SEQ ID NO: 664) | |
| QDIQMTQSPA TLSLSPGERA TLSCRASQSI SSFLAWYQQK PGQAPRLLIY DASYRATGIP | 60 |
| ARFSGSGSGT DFTLTISSLE PEDYAVYYCQ QRGNWPITFG QGTRLEIK | 108 |
| HC for Fab M272-B11 | |
| (SEQ ID NO: 665) | |
| EVQLLESGGG LVQPGGSLRL SCAASGFTFS KYSMIWVRQA PGKGLEWVSY IVPSGGYTGY | 60 |
| ADSVKGRFTI SRDNSKNTLY LQMNSLRAED TAVYYCAKDR AYGDYVGWNG FDYWGQGTLV | 120 |
| TVSS | 124 |
| LC for Fab M268-C03 | |
| (SEQ ID NO: 666) | |
| QDIQMTQSPA TLSLSPGERA TLSCRASQSI SSFLAWYQQK PGQAPRLLIY DASYRATGIP | 60 |
| ARFSGSGSGT DFTLTISSLE PEDYAVYYCQ QRGNWPITFG QGTRLEIK | 108 |
| HC for Fab M268-C03 | |
| (SEQ ID NO: 667) | |
| EVQLLESGGG LVQPGGSLRL SCAASGFTFS KYSMWWVRQA PGKGLEWVSS IYPSGGATFY | 60 |
| ADSVKGRFTI SRDNSKNTLY LQMNSLRAED TAVYYCAKDR AYGDYVGWNG FDYWGQGTLV | 120 |
| TVSS | 124 |
| LC for Fab M270-E10 | |
| (SEQ ID NO: 668) | |
| QDIQMTQSPA TLSLSPGERA TLSCRASQSI SSFLAWYQQK PGQAPRLLIY DASYRATGIP | 60 |
| ARFSGSGSGT DFTLTISSLE PEDYAVYYCQ QRGNWPITFG QGTRLEIK | 108 |
| HC for Fab M270-E10 | |
| (SEQ ID NO: 669) | |
| EVQLLESGGG LVQPGGSLRL SCAASGFTFS KYSMWWVRQA PGKGLEWVSV IYPSGGATFY | 60 |
| ADSVKGRFTI SRDNSKNTLY LQMNSLRAED TAVYYCAKDR AYGDYVGWNG FDYWGQGTLV | 120 |
| TVSS | 124 |
| LC for Fab M305-F06 | |
| (SEQ ID NO: 670) | |
| QDIQMTQSPA TLSLSPGERA TLSCRASQSI SSFLAWYQQK PGQAPRLLIY DASYRATGIP | 60 |
| ARFSGSGSGT DFTLTISSLE PEDYAVYYCQ QRGNWPITFG QGTRLEIK | 108 |
| HC for Fab M305-F06 | |
| (SEQ ID NO: 671) | |
| EVQLLESGGG LVQPGGSLRL SCAASGFTFS KYSMWWVRQA PGKGLEWVSV IYPSGGFTDY | 60 |
| ADSVKGRFTI SRDNSKNTLY LQMNSLRAED TAVYYCAKDR AYGDYVGWNG FDYWGQGTLV | 120 |
| TVSS | 124 |
| LC for Fab M270-H04 | |
| (SEQ ID NO: 672) | |
| QDIQMTQSPA TLSLSPGERA TLSCRASQSI SSFLAWYQQK PGQAPRLLIY DASYRATGIP | 60 |
| ARFSGSGSGT DFTLTISSLE PEDYAVYYCQ QRGNWPITFG QGTRLEIK | 108 |
| HC for Fab M270-H04 | |
| (SEQ ID NO: 673) | |
| EVQLLESGGG LVQPGGSLRL SCAASGFTFS KYTMWWVRQA PGKGLEWVSV IYPSGGATFY | 60 |
| ADSVKGRFTI SRDNSKNTLY LQMNSLRAED TAVYYCAKDR AYGDYVGWNG FDYWGQGTLV | 120 |
| TVSS | 124 |
| LC for Fab M269-D05 | |
| (SEQ ID NO: 674) | |
| QDIQMTQSPA TLSLSPGERA TLSCRASQSI SSFLAWYQQK PGQAPRLLIY DASYRATGIP | 60 |
| ARFSGSGSGT DFTLTISSLE PEDYAVYYCQ QRGNWPITFG QGTRLEIK | 108 |
| HC for Fab M269-D05 | |
| (SEQ ID NO: 675) | |
| EVQLLESGGG LVQPGGSLRL SCAASGFTFS KYWMWWVRQA PGKGLEWVSV IVPSGGMTYY | 60 |
| ADSVKGRFTI SRDNSKNTLY LQMNSLRAED TAVYYCAKDR AYGDYVGWNG FDYWGQGTLV | 120 |
| TVSS | 124 |
| LC for Fab M270-F02 | |
| (SEQ ID NO: 676) | |
| QDIQMTQSPA TLSLSPGERA TLSCRASQSI SSFLAWYQQK PGQAPRLLIY DASYRATGIP | 60 |
| ARFSGSGSGT DFTLTISSLE PEDYAVYYCQ QRGNWPITFG QGTRLEIK | 108 |
| HC for Fab M270-F02 | |
| (SEQ ID NO: 677) | |
| EVQLLESGGG LVQPGGSLRL SCAASGFTFS KYYMWWVRQA PGKGLEWVSS IYSSGGGTFY | 60 |
| ADSVKGRFTI SRDNSKNTLY LQMNSLRAED TAVYYCAKDR AYGDYVGWNG FDYWGQGTLV | 120 |
| TVSS | 124 |
| LC for Fab M275-D07 | |
| (SEQ ID NO: 678) | |
| QDIQMTQSPA TLSLSPGERA TLSCRASQSI SSFLAWYQQK PGQAPRLLIY DASYRATGIP | 60 |
| ARFSGSGSGT DFTLTISSLE PEDYAVYYCQ QRGNWPITFG QGTRLEIK | 108 |
| HC for Fab M275-D07 | |
| (SEQ ID NO: 679) | |
| EVQLLESGGG LVQPGGSLRL SCAASGFTFS LYAMIWVRQA PGKGLEWVSY ISPSGGFTGY | 60 |
| ADSVKGRFTI SRDNSKNTLY LQMNSLRAED TAVYYCAKDR AYGDYVGWNG FDYWGQGTLV | 120 |
| TVSS | 124 |
| LC for Fab M273-E12 | |
| (SEQ ID NO: 680) | |
| QDIQMTQSPA TLSLSPGERA TLSCRASQSI SSFLAWYQQK PGQAPRLLIY DASYRATGIP | 60 |
| ARFSGSGSGT DFTLTISSLE PEDYAVYYCQ QRGNWPITFG QGTRLEIK | 108 |
| HC for Fab M273-E12 | |
| (SEQ ID NO: 681) | |
| EVQLLESGGG LVQPGGSLRL SCAASGFTFS LYAMWWVRQA PGKGLEWVSS IVPSGGKTYY | 60 |
| ADSVKGRFTI SRDNSKNTLY LQMNSLRAED TAVYYCAKDR AYGDYVGWNG FDYWGQGTLV | 120 |
| TVSS | 124 |
| LC for Fab M273-A09 | |
| (SEQ ID NO: 682) | |
| QDIQMTQSPA TLSLSPGERA TLSCRASQSI SSFLAWYQQK PGQAPRLLIY DASYRATGIP | 60 |
| ARFSGSGSGT DFTLTISSLE PEDYAVYYCQ QRGNWPITFG QGTRLEIK | 108 |
| HC for Fab M273-A09 | |
| (SEQ ID NO: 683) | |
| EVQLLESGGG LVQPGGSLRL SCAASGFTFS LYAMWWVRQA PGKGLEWVSY IYPSGGGTYY | 60 |
| ADSVKGRFTI SRDNSKNTLY LQMNSLRAED TAVYYCAKDR AYGDYVGWNG FDYWGQGTLV | 120 |
| TVSS | 124 |
| LC for Fab M271-G03 | |
| (SEQ ID NO: 684) | |
| QDIQMTQSPA TLSLSPGERA TLSCRASQSI SSFLAWYQQK PGQAPRLLIY DASYRATGIP | 60 |
| ARFSGSGSGT DFTLTISSLE PEDYAVYYCQ QRGNWPITFG QGTRLEIK | 108 |
| HC for Fab M271-G03 | |
| (SEQ ID NO: 685) | |
| EVQLLESGGG LVQPGGSLRL SCAASGFTFS LYDMLWVRQA PGKGLEWVSY IYPSGGFTGY | 60 |
| ADSVKGRFTI SRDNSKNTLY LQMNSLRAED TAVYYCAKDR AYGDYVGWNG FDYWGQGTLV | 120 |
| TVSS | 124 |
| LC for Fab M299-F01 | |
| (SEQ ID NO: 686) | |
| QDIQMTQSPA TLSLSPGERA TLSCRASQSI SSFLAWYQQK PGQAPRLLIY DASYRATGIP | 60 |
| ARFSGSGSGT DFTLTISSLE PEDYAVYYCQ QRGNWPITFG QGTRLEIK | 108 |
| HC for Fab M299-F01 | |
| (SEQ ID NO: 687) | |
| EVQLLESGGG LVQPGGSLRL SCAASGFTFS LYDMVWVRQA PGKGLEWVSW IGPSGGLTIY | 60 |
| ADSVKGRFTI SRDNSKNTLY LQMNSLRAED TAVYYCAKDR AYGDYVGWNG FDYWGQGTLV | 120 |
| TVSS | 124 |
| LC for Fab M274-A03 | |
| (SEQ ID NO: 688) | |
| QDIQMTQSPA TLSLSPGERA TLSCRASQSI SSFLAWYQQK PGQAPRLLIY DASYRATGIP | 60 |
| ARFSGSGSGT DFTLTISSLE PEDYAVYYCQ QRGNWPITFG QGTRLEIK | 108 |
| HC for Fab M274-A03 | |
| (SEQ ID NO: 689) | |
| EVQLLESGGG LVQPGGSLRL SCAASGFTFS LYDMWWVRQA PGKGLEWVSS ISSSGGYTGY | 60 |
| ADSVKGRFTI SRDNSKNTLY LQMNSLRAED TAVYYCAKDR AYGDYVGWNG FDYWGQGTLV | 120 |
| TVSS | 124 |
| LC for Fab M276-B04 | |
| (SEQ ID NO: 690) | |
| QDIQMTQSPA TLSLSPGERA TLSCRASQSI SSFLAWYQQK PGQAPRLLIY DASYRATGIP | 60 |
| ARFSGSGSGT DFTLTISSLE PEDYAVYYCQ QRGNWPITFG QGTRLEIK | 108 |
| HC for Fab M276-B04 | |
| (SEQ ID NO: 691) | |
| EVQLLESGGG LVQPGGSLRL SCAASGFTFS LYDMWWVRQA PGKGLEWVSV IRPSGGSTYY | 60 |
| ADSVKGRFTI SRDNSKNTLY LQMNSLRAED TAVYYCAKDR AYGDYVGWNG FDYWGQGTLV | 120 |
| TVSS | 124 |
| LC for Fab M269-B10 | |
| (SEQ ID NO: 692) | |
| QDIQMTQSPA TLSLSPGERA TLSCRASQSI SSFLAWYQQK PGQAPRLLIY DASYRATGIP | 60 |
| ARFSGSGSGT DFTLTISSLE PEDYAVYYCQ QRGNWPITFG QGTRLEIK | 108 |
| HC for Fab M269-B10 | |
| (SEQ ID NO: 693) | |
| EVQLLESGGG LVQPGGSLRL SCAASGFTFS LYDMWWVRQA PGKGLEWVSV IYPSGGPTYY | 60 |
| ADSVKGRFTI SRDNSKNTLY LQMNSLRAED TAVYYCAKDR AYGDYVGWNG FDYWGQGTLV | 120 |
| TVSS | 124 |
| LC for Fab M270-A05 | |
| (SEQ ID NO: 694) | |
| QDIQMTQSPA TLSLSPGERA TLSCRASQSI SSFLAWYQQK PGQAPRLLIY DASYRATGIP | 60 |
| ARFSGSGSGT DFTLTISSLE PEDYAVYYCQ QRGNWPITFG QGTRLEIK | 108 |
| HC for Fab M270-A05 | |
| (SEQ ID NO: 695) | |
| EVQLLESGGG LVQPGGSLRL SCAASGFTFS LYDMWWVRQA PGKGLEWVSV IYSSGGATFY | 60 |
| ADSVKGRFTI SRDNSKNTLY LQMNSLRAED TAVYYCAKDR AYGDYVGWNG FDYWGQGTLV | 120 |
| TVSS | 124 |
| LC for Fab M268-B11 | |
| (SEQ ID NO: 696) | |
| QDIQMTQSPA TLSLSPGERA TLSCRASQSI SSFLAWYQQK PGQAPRLLIY DASYRATGIP | 60 |
| ARFSGSGSGT DFTLTISSLE PEDYAVYYCQ QRGNWPITFG QGTRLEIK | 108 |
| HC for Fab M268-B11 | |
| (SEQ ID NO: 697) | |
| EVQLLESGGG LVQPGGSLRL SCAASGFTFS LYDMWWVRQA PGKGLEWVSV IYSSGGTTFY | 60 |
| ADSVKGRFTI SRDNSKNTLY LQMNSLRAED TAVYYCAKDR AYGDYVGWNG FDYWGQGTLV | 120 |
| TVSS | 124 |
| LC for Fab M272-F10 | |
| (SEQ ID NO: 698) | |
| QDIQMTQSPA TLSLSPGERA TLSCRASQSI SSFLAWYQQK PGQAPRLLIY DASYRATGIP | 60 |
| ARFSGSGSGT DFTLTISSLE PEDYAVYYCQ QRGNWPITFG QGTRLEIK | 108 |
| HC for Fab M272-F10 | |
| (SEQ ID NO: 699) | |
| EVQLLESGGG LVQPGGSLRL SCAASGFTFS LYDMWWVRQA PGKGLEWVSV IYSSGGYTAY | 60 |
| ADSVKGRFTI SRDNSKNTLY LQMNSLRAED TAVYYCAKDR AYGDYVGWNG FDYWGQGTLV | 120 |
| TVSS | 124 |
| LC for Fab M307-F04 | |
| (SEQ ID NO: 700) | |
| QDIQMTQSPA TLSLSPGERA TLSCRASQSI SSFLAWYQQK PGQAPRLLIY DASYRATGIP | 60 |
| ARFSGSGSGT DFTLTISSLE PEDYAVYYCQ QRGNWPITFG QGTRLEIK | 108 |
| HC for Fab M307-F04 | |
| (SEQ ID NO: 701) | |
| EVQLLESGGG LVQPGGSLRL SCAASGFTFS LYDMWWVRQA PGKGLEWVSV IYSSGGYTGY | 60 |
| ADSVKGRFTI SRDNSKNTLY LQMNSLRAED TAVYYCAKDR AYGDYVGWNG FDYWGQGTLV | 120 |
| TVSS | 124 |
| LC for Fab M274-F08 | |
| (SEQ ID NO: 702) | |
| QDIQMTQSPA TLSLSPGERA TLSCRASQSI SSFLAWYQQK PGQAPRLLIY DASYRATGIP | 60 |
| ARFSGSGSGT DFTLTISSLE PEDYAVYYCQ QRGNWPITFG QGTRLEIK | 108 |
| HC for Fab M274-F08 | |
| (SEQ ID NO: 703) | |
| EVQLLESGGG LVQPGGSLRL SCAASGFTFS LYDMWWVRQA PGKGLEWVSY IGPSGGNTLY | 60 |
| ADSVKGRFTI SRDNSKNTLY LQMNSLRAED TAVYYCAKDR AYGDYVGWNG FDYWGQGTLV | 120 |
| TVSS | 124 |
| LC for Fab M275-D11 | |
| (SEQ ID NO: 704) | |
| QDIQMTQSPA TLSLSPGERA TLSCRASQSI SSFLAWYQQK PGQAPRLLIY DASYRATGIP | 60 |
| ARFSGSGSGT DFTLTISSLE PEDYAVYYCQ QRGNWPITFG QGTRLEIK | 108 |
| HC for Fab M275-D11 | |
| (SEQ ID NO: 705) | |
| EVQLLESGGG LVQPGGSLRL SCAASGFTFS LYEMWWVRQA PGKGLEWVSV ISPSGGGTYY | 60 |
| ADSVKGRFTI SRDNSKNTLY LQMNSLRAED TAVYYCAKDR AYGDYVGWNG FDYWGQGTLV | 120 |
| TVSS | 124 |
| LC for Fab M269-B03 | |
| (SEQ ID NO: 706) | |
| QDIQMTQSPA TLSLSPGERA TLSCRASQSI SSFLAWYQQK PGQAPRLLIY DASYRATGIP | 60 |
| ARFSGSGSGT DFTLTISSLE PEDYAVYYCQ QRGNWPITFG QGTRLEIK | 108 |
| HC for Fab M269-B03 | |
| (SEQ ID NO: 707) | |
| EVQLLESGGG LVQPGGSLRL SCAASGFTFS LYEMWWVRQA PGKGLEWVSY ISSSGGGTLY | 60 |
| ADSVKGRFTI SRDNSKNTLY LQMNSLRAED TAVYYCAKDR AYGDYVGWNG FDYWGQGTLV | 120 |
| TVSS | 124 |
| LC for Fab M269-F10 | |
| (SEQ ID NO: 708) | |
| QDIQMTQSPA TLSLSPGERA TLSCRASQSI SSFLAWYQQK PGQAPRLLIY DASYRATGIP | 60 |
| ARFSGSGSGT DFTLTISSLE PEDYAVYYCQ QRGNWPITFG QGTRLEIK | 108 |
| HC for Fab M269-F10 | |
| (SEQ ID NO: 709) | |
| EVQLLESGGG LVQPGGSLRL SCAASGFTFS LYMMWWVRKA PGKGLEWVSS IYPSGGTYYA | 60 |
| DSVKGRFTIS RDNSKNTLYL QMNSLRAEDT AVYYCAKDRA YGDYVGWNGF DYWGQGTLVT | 120 |
| VSS | 123 |
| LC for Fab M306-E11 | |
| (SEQ ID NO: 710) | |
| QDIQMTQSPA TLSLSPGERA TLSCRASQSI SSFLAWYQQK PGQAPRLLIY DASYRATGIP | 60 |
| ARFSGSGSGT DFTLTISSLE PEDYAVYYCQ QRGNWPITFG QGTRLEIK | 108 |
| HC for Fab M306-E11 | |
| (SEQ ID NO: 711) | |
| EVQLLESGGG LVQPGGSLRL SCAASGFTFS LYNMWWVRQA PGKGLEWVSV IYPSGGYTGY | 60 |
| ADSVKGRFTI SRDNSKNTLY LQMNSLRAED TAVYYCAKDR AYGDYVGWNG FDYWGQGTLV | 120 |
| TVSS | 124 |
| LC for Fab M271-B12 | |
| (SEQ ID NO: 712) | |
| QDIQMTQSPA TLSLSPGERA TLSCRASQSI SSFLAWYQQK PGQAPRLLIY DASYRATGIP | 60 |
| ARFSGSGSGT DFTLTISSLE PEDYAVYYCQ QRGNWPITFG QGTRLEIK | 108 |
| HC for Fab M271-B12 | |
| (SEQ ID NO: 713) | |
| EVQLLESGGG LVQPGGSLRL SCAASGFTFS LYPMIWVRQA PGKGLEWVSY ISPSGGFTDY | 60 |
| ADSVKGRFTI SRDNSKNTLY LQMNSLRAED TAVYYCAKDR AYGDYVGWNG FDYWGQGTLV | 120 |
| TVSS | 124 |
| LC for Fab M304-E07 | |
| (SEQ ID NO: 714) | |
| QDIQMTQSPA TLSLSPGERA TLSCRASQSI SSFLAWYQQK PGQAPRLLIY DASYRATGIP | 60 |
| ARFSGSGSGT DFTLTISSLE PEDYAVYYCQ QRGNWPITFG QGTRLEIK | 108 |
| HC for Fab M304-E07 | |
| (SEQ ID NO: 715) | |
| EVQLLESGGG LVQPGGSLRL SCAASGFTFS LYPMMWVRQA PGKGLEWVSY IYPSGGGTFY | 60 |
| ADSVKGRFTI SRDNSKNTLY LQMNSLRAED TAVYYCAKDR AYGDYVGWNG FDYWGQGTLV | 120 |
| TVSS | 124 |
| LC for Fab M268-H02 | |
| (SEQ ID NO: 716) | |
| QDIQMTQSPA TLSLSPGERA TLSCRASQSI SSFLAWYQQK PGQAPRLLIY DASYRATGIP | 60 |
| ARFSGSGSGT DFTLTISSLE PEDYAVYYCQ QRGNWPITFG QGTRLEIK | 108 |
| HC for Fab M268-H02 | |
| (SEQ ID NO: 717) | |
| EVQLLESGGG LVQPGGSLRL SCAASGFTFS LYPMWWVRQA PGKGLEWVSS ISPSGGATFY | 60 |
| ADSVKGRFTI SRDNSKNTLY LQMNSLRAED TAVYYCAKDR AYGDYVGWNG FDYWGQGTLV | 120 |
| TVSS | 124 |
| LC for Fab M301-B03 | |
| (SEQ ID NO: 718) | |
| QDIQMTQSPA TLSLSPGERA TLSCRASQSI SSFLAWYQQK PGQAPRLLIY DASYRATGIP | 60 |
| ARFSGSGSGT DFTLTISSLE PEDYAVYYCQ QRGNWPITFG QGTRLEIK | 108 |
| HC for Fab M301-B03 | |
| (SEQ ID NO: 719) | |
| EVQLLESGGG LVQPGGSLRL SCAASGFTFS LYPMWWVRQA PGKGLEWVSS ISPSGGGTFY | 60 |
| ADSVKGRFTI SRDNSKNTLY LQMNSLRAED TAVYYCAKDR AYGDYVGWNG FDYWGQGTLV | 120 |
| TVSS | 124 |
| LC for Fab M306-D04 | |
| (SEQ ID NO: 720) | |
| QDIQMTQSPA TLSLSPGERA TLSCRASQSI SSFLAWYQQK PGQAPRLLIY DASYRATGIP | 60 |
| ARFSGSGSGT DFTLTISSLE PEDYAVYYCQ QRGNWPITFG QGTRLEIK | 108 |
| HC for Fab M306-D04 | |
| (SEQ ID NO: 721) | |
| EVQLLESGGG LVQPGGSLRL SCAASGFTFS LYPMWWVRQA PGKGLEWVSS IYPSGGATFY | 60 |
| ADSVKGRFTI SRDNSKNTLY LQMNSLRAED TAVYYCAKDR AYGDYVGWNG FDYWGQGTLV | 120 |
| TVSS | 124 |
| LC for Fab M270-D05 | |
| (SEQ ID NO: 722) | |
| QDIQMTQSPA TLSLSPGERA TLSCRASQSI SSFLAWYQQK PGQAPRLLIY DASYRATGIP | 60 |
| ARFSGSGSGT DFTLTISSLE PEDYAVYYCQ QRGNWPITFG QGTRLEIK | 108 |
| HC for Fab M270-D05 | |
| (SEQ ID NO: 723) | |
| EVQLLESGGG LVQPGGSLRL SCAASGFTFS LYPMWWVRQA PGKGLEWVSV IYSSGGATFY | 60 |
| ADSVKGRFTI SRDNSKNTLY LQMNSLRAED TAVYYCAKDR AYGDYVGWNG FDYWGQGTLV | 120 |
| TVSS | 124 |
| LC for Fab M269-C07 | |
| (SEQ ID NO: 724) | |
| QDIQMTQSPA TLSLSPGERA TLSCRASQSI SSFLAWYQQK PGQAPRLLIY DASYRATGIP | 60 |
| ARFSGSGSGT DFTLTISSLE PEDYAVYYCQ QRGNWPITFG QGTRLEIK | 108 |
| HC for Fab M269-C07 | |
| (SEQ ID NO: 725) | |
| EVQLLESGGG LVQPGGSLRL SCAASGFTFS LYPMWWVRQA PGKGLEWVSW IVPSGGFTLY | 60 |
| ADSVKGRFTI SRDNSKNTLY LQMNSLRAED TAVYYCAKDR AYGDYVGWNG FDYWGQGTLV | 120 |
| TVSS | 124 |
| LC for Fab M269-G10 | |
| (SEQ ID NO: 726) | |
| QDIQMTQSPA TLSLSPGERA TLSCRASQSI SSFLAWYQQK PGQAPRLLIY DASYRATGIP | 60 |
| ARFSGSGSGT DFTLTISSLE PEDYAVYYCQ QRGNWPITFG QGTRLEIK | 108 |
| HC for Fab M269-G10 | |
| (SEQ ID NO: 727) | |
| EVQLLESGGG LVQPGGSLRL SCAASGFTFS LYPMWWVRQA PGKGLEWVSY ISPSGGGTLY | 60 |
| ADSVKGRFTI SRDNSKNTLY LQMNSLRAED TAVYYCAKDR AYGDYVGWNG FDYWGQGTLV | 120 |
| TVSS | 124 |
| LC for Fab M274-A12 | |
| (SEQ ID NO: 728) | |
| QDIQMTQSPA TLSLSPGERA TLSCRASQSI SSFLAWYQQK PGQAPRLLIY DASYRATGIP | 60 |
| ARFSGSGSGT DFTLTISSLE PEDYAVYYCQ QRGNWPITFG QGTRLEIK | 108 |
| HC for Fab M274-A12 | |
| (SEQ ID NO: 729) | |
| EVQLLESGGG LVQPGGSLRL SCAASGFTFS LYPMWWVRQA PGKGLEWVSY ISSSGGGTYY | 60 |
| ADSVKGRFTI SRDNSKNTLY LQMNSLRAED TAVYYCAKDR AYGDYVGWNG FDYWGQGTLV | 120 |
| TVSS | 124 |
| LC for Fab M272-B10 | |
| (SEQ ID NO: 730) | |
| QDIQMTQSPA TLSLSPGERA TLSCRASQSI SSFLAWYQQK PGQAPRLLIY DASYRATGIP | 60 |
| ARFSGSGSGT DFTLTISSLE PEDYAVYYCQ QRGNWPITFG QGTRLEIK | 108 |
| HC for Fab M272-B10 | |
| (SEQ ID NO: 731) | |
| EVQLLESGGG LVQPGGSLRL SCAASGFTFS LYPMWWVRQA PGKGLEWVSY IVPSGGGTFY | 60 |
| ADSVKGRFTI SRDNSKNTLY LQMNSLRAED TAVYYCAKDR AYGDYVGWNG FDYWGQGTLV | 120 |
| TVSS | 124 |
| LC for Fab M302-A05 | |
| (SEQ ID NO: 732) | |
| QDIQMTQSPA TLSLSPGERA TLSCRASQSI SSFLAWYQQK PGQAPRLLIY DASYRATGIP | 60 |
| ARFSGSGSGT DFTLTISSLE PEDYAVYYCQ QRGNWPITFG QGTRLEIK | 108 |
| HC for Fab M302-A05 | |
| (SEQ ID NO: 733) | |
| EVQLLESGGG LVQPGGSLRL SCAASGFTFS LYPMWWVRQA PGKGLEWVSY IVSSGGATFY | 60 |
| ADSVKGRFTI SRDNSKNTLY LQMNSLRAED TAVYYCAKDR AYGDYVGWNG FDYWGQGTLV | 120 |
| TVSS | 124 |
| LC for Fab M273-D07 | |
| (SEQ ID NO: 734) | |
| QDIQMTQSPA TLSLSPGERA TLSCRASQSI SSFLAWYQQK PGQAPRLLIY DASYRATGIP | 60 |
| ARFSGSGSGT DFTLTISSLE PEDYAVYYCQ QRGNWPITFG QGTRLEIK | 108 |
| HC for Fab M273-D07 | |
| (SEQ ID NO: 735) | |
| EVQLLESGGG LVQPGGSLRL SCAASGFTFS LYPMWWVRQA PGKGLEWVSY IYPSGGATMY | 60 |
| ADSVKGRFTI SRDNSKNTLY LQMNSLRAED TAVYYCAKDR AYGDYVGWNG FDYWGQGTLV | 120 |
| TVSS | 124 |
| LC for Fab M274-C03 | |
| (SEQ ID NO: 736) | |
| QDIQMTQSPA TLSLSPGERA TLSCRASQSI SSFLAWYQQK PGQAPRLLIY DASYRATGIP | 60 |
| ARFSGSGSGT DFTLTISSLE PEDYAVYYCQ QRGNWPITFG QGTRLEIK | 108 |
| HC for Fab M274-C03 | |
| (SEQ ID NO: 737) | |
| EVQLLESGGG LVQPGGSLRL SCAASGFTFS LYQMWWVRQA PGKGLEWVSV IYPSGGATYY | 60 |
| ADSVKGRFTI SRDNSKNTLY LQMNSLRAED TAVYYCAKDR AYGDYVGWNG FDYWGQGTLV | 120 |
| TVSS | 124 |
| LC for Fab M272-E09 | |
| (SEQ ID NO: 738) | |
| QDIQMTQSPA TLSLSPGERA TLSCRASQSI SSFLAWYQQK PGQAPRLLIY DASYRATGIP | 60 |
| ARFSGSGSGT DFTLTISSLE PEDYAVYYCQ QRGNWPITFG QGTRLEIK | 108 |
| HC for Fab M272-E09 | |
| (SEQ ID NO: 739) | |
| EVQLLESGGG LVQPGGSLRL SCAASGFTFS LYQMWWVRQA PGKGLEWVSV IYPSGGTFYA | 60 |
| DSVKGRFTIS RDNSKNTLYL QMNSLRAEDT AVYYCAKDRA YGDYVGWNGF DYWGQGTLVT | 120 |
| VSS | 123 |
| LC for Fab M298-G03 | |
| (SEQ ID NO: 740) | |
| QDIQMTQSPA TLSLSPGERA TLSCRASQSI SSFLAWYQQK PGQAPRLLIY DASYRATGIP | 60 |
| ARFSGSGSGT DFTLTISSLE PEDYAVYYCQ QRGNWPITFG QGTRLEIK | 108 |
| HC for Fab M298-G03 | |
| (SEQ ID NO: 741) | |
| EVQLLESGGG LVQPGGSLRL SCAASGFTFS MYDMWWVRQA PGKGLEWVSV ISPSGGGTFY | 60 |
| ADSVKGRFTI SRDNSKNTLY LQMNSLRAED TAVYYCAKDR AYGDYVGWNG FDYWGQGTLV | 120 |
| TVSS | 124 |
| LC for Fab M268-E04 | |
| (SEQ ID NO: 742) | |
| QDIQMTQSPA TLSLSPGERA TLSCRASQSI SSFLAWYQQK PGQAPRLLIY DASYRATGIP | 60 |
| ARFSGSGSGT DFTLTISSLE PEDYAVYYCQ QRGNWPITFG QGTRLEIK | 108 |
| HC for Fab M268-E04 | |
| (SEQ ID NO: 743) | |
| EVQLLESGGG LVQPGGSLRL SCAASGFTFS MYDMWWVRQA PGKGLEWVSV IYPSGGNTLY | 60 |
| ADSVKGRFTI SRDNSKNTLY LQMNSLRAED TAVYYCAKDR AYGDYVGWNG FDYWGQGTLV | 120 |
| TVSS | 124 |
| LC for Fab M270-A08 | |
| (SEQ ID NO: 744) | |
| QDIQMTQSPA TLSLSPGERA TLSCRASQSI SSFLAWYQQK PGQAPRLLIY DASYRATGIP | 60 |
| ARFSGSGSGT DFTLTISSLE PEDYAVYYCQ QRGNWPITFG QGTRLEIK | 108 |
| HC for Fab M270-A08 | |
| (SEQ ID NO: 745) | |
| EVQLLESGGG LVQPGGSLRL SCAASGFTFS MYDMWWVRQA PGKGLEWVSV IYPSGGPTFY | 60 |
| ADSVKGRFTI SRDNSKNTLY LQMNSLRAED TAVYYCAKDR AYGDYVGWNG FDYWGQGTLV | 120 |
| TVSS | 124 |
| LC for Fab M268-C07 | |
| (SEQ ID NO: 746) | |
| QDIQMTQSPA TLSLSPGERA TLSCRASQSI SSFLAWYQQK PGQAPRLLIY DASYRATGIP | 60 |
| ARFSGSGSGT DFTLTISSLE PEDYAVYYCQ QRGNWPITFG QGTRLEIK | 108 |
| HC for Fab M268-C07 | |
| (SEQ ID NO: 747) | |
| EVQLLESGGG LVQPGGSLRL SCAASGFTFS MYDMWWVRQA PGKGLEWVSV IYPSGGYTAY | 60 |
| ADSVKGRFTI SRDNSKNTLY LQMNSLRAED TAVYYCAKDR AYGDYVGWNG FDYWGQGTLV | 120 |
| TVSS | 124 |
| LC for Fab M268-F02 | |
| (SEQ ID NO: 748) | |
| QDIQMTQSPA TLSLSPGERA TLSCRASQSI SSFLAWYQQK PGQAPRLLIY DASYRATGIP | 60 |
| ARFSGSGSGT DFTLTISSLE PEDYAVYYCQ QRGNWPITFG QGTRLEIK | 108 |
| HC for Fab M268-F02 | |
| (SEQ ID NO: 749) | |
| EVQLLESGGG LVQPGGSLRL SCAASGFTFS MYDMWWVRQA PGKGLEWVSV IYSSGGFTDY | 60 |
| ADSVKGRFTI SRDNSKNTLY LQMNSLRAED TAVYYCAKDR AYGDYVGWNG FDYWGQGTLV | 120 |
| TVSS | 124 |
| LC for Fab M271-A05 | |
| (SEQ ID NO: 750) | |
| QDIQMTQSPA TLSLSPGERA TLSCRASQSI SSFLAWYQQK PGQAPRLLIY DASYRATGIP | 60 |
| ARFSGSGSGT DFTLTISSLE PEDYAVYYCQ QRGNWPITFG QGTRLEIK | 108 |
| HC for Fab M271-A05 | |
| (SEQ ID NO: 751) | |
| EVQLLESGGG LVQPGGSLRL SCAASGFTFS MYDMWWVRQA PGKGLEWVSV IYSSGGPTFY | 60 |
| ADSVKGRFTI SRDNSKNTLY LQMNSLRAED TAVYYCAKDR AYGDYVGWNG FDYWGQGTLV | 120 |
| TVSS | 124 |
| LC for Fab M270-C12 | |
| (SEQ ID NO: 752) | |
| QDIQMTQSPA TLSLSPGERA TLSCRASQSI SSFLAWYQQK PGQAPRLLIY DASYRATGIP | 60 |
| ARFSGSGSGT DFTLTISSLE PEDYAVYYCQ QRGNWPITFG QGTRLEIK | 108 |
| HC for Fab M270-C12 | |
| (SEQ ID NO: 753) | |
| EVQLLESGGG LVQPGGSLRL SCAASGFTFS MYDMWWVRQA PGKGLEWVSV IYSSGGVTFY | 60 |
| ADSVKGRFTI SRDNSKNTLY LQMNSLRAED TAVYYCAKDR AYGDYVGWNG FDYWGQGTLV | 120 |
| TVSS | 124 |
| LC for Fab M272-A02 | |
| (SEQ ID NO: 754) | |
| QDIQMTQSPA TLSLSPGERA TLSCRASQSI SSFLAWYQQK PGQAPRLLIY DASYRATGIP | 60 |
| ARFSGSGSGT DFTLTISSLE PEDYAVYYCQ QRGNWPITFG QGTRLEIK | 108 |
| HC for Fab M272-A02 | |
| (SEQ ID NO: 755) | |
| EVQLLESGGG LVQPGGSLRL SCAASGFTFS MYDMWWVRQA PGKGLEWVSV IYSSGGYTAY | 60 |
| ADSVKGRFTI SRDNSKNTLY LQMNSLRAED TAVYYCAKDR AYGDYVGWNG FDYWGQGTLV | 120 |
| TVSS | 124 |
| LC for Fab M299-F03 | |
| (SEQ ID NO: 756) | |
| QDIQMTQSPA TLSLSPGERA TLSCRASQSI SSFLAWYQQK PGQAPRLLIY DASYRATGIP | 60 |
| ARFSGSGSGT DFTLTISSLE PEDYAVYYCQ QRGNWPITFG QGTRLEIK | 108 |
| HC for Fab M299-F03 | |
| (SEQ ID NO: 757) | |
| EVQLLESGGG LVQPGGSLRL SCAASGFTFS MYDMWWVRQA PGKGLEWVSV IYSSGGYTDY | 60 |
| ADSVKGRFTI SRDNSKNTLY LQMNSLRAED TAVYYCAKDR AYGDYVGWNG FDYWGQGTLV | 120 |
| TVSS | 124 |
| LC for Fab M272-F05 | |
| (SEQ ID NO: 758) | |
| QDIQMTQSPA TLSLSPGERA TLSCRASQSI SSFLAWYQQK PGQAPRLLIY DASYRATGIP | 60 |
| ARFSGSGSGT DFTLTISSLE PEDYAVYYCQ QRGNWPITFG QGTRLEIK | 108 |
| HC for Fab M272-F05 | |
| (SEQ ID NO: 759) | |
| EVQLLESGGG LVQPGGSLRL SCAASGFTFS MYDMWWVRQA PGKGLEWVSV IYSSGGYTNY | 60 |
| ADSVKGRFTI SRDNSKNTLY LQMNSLRAED TAVYYCAKDR AYGDYVGWNG FDYWGQGTLV | 120 |
| TVSS | 124 |
| LC for Fab M301-D12 | |
| (SEQ ID NO: 760) | |
| QDIQMTQSPA TLSLSPGERA TLSCRASQSI SSFLAWYQQK PGQAPRLLIY DASYRATGIP | 60 |
| ARFSGSGSGT DFTLTISSLE PEDYAVYYCQ QRGNWPITFG QGTRLEIK | 108 |
| HC for Fab M301-D12 | |
| (SEQ ID NO: 761) | |
| EVQLLESGGG LVQPGGSLRL SCAASGFTFS MYDMWWVRQA PGKGLEWVSV IYSSGGYTSY | 60 |
| ADSVKGRFTI SRDNSKNTLY LQMNSLRAED TAVYYCAKDR AYGDYVGWNG FDYWGQGTLV | 120 |
| TVSS | 124 |
| LC for Fab M276-B10 | |
| (SEQ ID NO: 762) | |
| QDIQMTQSPA TLSLSPGERA TLSCRASQSI SSFLAWYQQK PGQAPRLLIY DASYRATGIP | 60 |
| ARFSGSGSGT DFTLTISSLE PEDYAVYYCQ QRGNWPITFG QGTRLEIK | 108 |
| HC for Fab M276-B10 | |
| (SEQ ID NO: 763) | |
| EVQLLESGGG LVQPGGSLRL SCAASGFTFS MYDMWWVRQA PGKGLEWVSY ISSSGGSTLY | 60 |
| ADSVKGRFTI SRDNSKNTLY LQMNSLRAED TAVYYCAKDR AYGDYVGWNG FDYWGQGTLV | 120 |
| TVSS | 124 |
| LC for Fab M270-B05 | |
| (SEQ ID NO: 764) | |
| QDIQMTQSPA TLSLSPGERA TLSCRASQSI SSFLAWYQQK PGQAPRLLIY DASYRATGIP | 60 |
| ARFSGSGSGT DFTLTISSLE PEDYAVYYCQ QRGNWPITFG QGTRLEIK | 108 |
| HC for Fab M270-B05 | |
| (SEQ ID NO: 765) | |
| EVQLLESGGG LVQPGGSLRL SCAASGFTFS MYMMIWVRQA PGKGLEWVSS IYPSGGFTSY | 60 |
| ADSVKGRFTI SRDNSKNTLY LQMNSLRAED TAVYYCAKDR AYGDYVGWNG FDYWGQGTLV | 120 |
| TVSS | 124 |
| LC for Fab M277-E11 | |
| (SEQ ID NO: 766) | |
| QDIQMTQSPA TLSLSPGERA TLSCRASQSI SSFLAWYQQK PGQAPRLLIY DASYRATGIP | 60 |
| ARFSGSGSGT DFTLTISSLE PEDYAVYYCQ QRGNWPITFG QGTRLEIK | 108 |
| HC for Fab M277-E11 | |
| (SEQ ID NO: 767) | |
| EVQLLESGGG LVQPGGSLRL SCAASGFTFS MYNMWWVRQA PGKGLEWVSS ISPSGGATYY | 60 |
| ADSVKGRFTI SRDNSKNTLY LQMNSLRAED TAVYYCAKDR AYGDYVGWNG FDYWGQGTLV | 120 |
| TVSS | 124 |
| LC for Fab M304-E02 | |
| (SEQ ID NO: 768) | |
| QDIQMTQSPA TLSLSPGERA TLSCRASQSI SSFLAWYQQK PGQAPRLLIY DASYRATGIP | 60 |
| ARFSGSGSGT DFTLTISSLE PEDYAVYYCQ QRGNWPITFG QGTRLEIK | 108 |
| HC for Fab M304-E02 | |
| (SEQ ID NO: 769) | |
| EVQLLESGGG LVQPGGSLRL SCAASGFTFS MYPIIWVRQA PGKGLEWVSY ISPSGGFTGY | 60 |
| ADSVKGRFTI SRDNSKNTLY LQMNSLRAED TAVYYCAKDR AYGDYVGWNG FDYWGQGTLV | 120 |
| TVSS | 124 |
| LC for Fab M307-E12 | |
| (SEQ ID NO: 770) | |
| QDIQMTQSPA TLSLSPGERA TLSCRASQSI SSFLAWYQQK PGQAPRLLIY DASYRATGIP | 60 |
| ARFSGSGSGT DFTLTISSLE PEDYAVYYCQ QRGNWPITFG QGTRLEIK | 108 |
| HC for Fab M307-E12 | |
| (SEQ ID NO: 771) | |
| EVQLLESGGG LVQPGGSLRL SCAASGFTFS MYPMFWVRQA PGKGLEWVSY ISPSGGWTAY | 60 |
| ADSVKGRFTI SRDNSKNTLY LQMNSLRAED TAVYYCAKDR AYGDYVGWNG FDYWGQGTLV | 120 |
| TVSS | 124 |
| LC for Fab M271-H07 | |
| (SEQ ID NO: 772) | |
| QDIQMTQSPA TLSLSPGERA TLSCRASQSI SSFLAWYQQK PGQAPRLLIY DASYRATGIP | 60 |
| ARFSGSGSGT DFTLTISSLE PEDYAVYYCQ QRGNWPITFG QGTRLEIK | 108 |
| HC for Fab M271-H07 | |
| (SEQ ID NO: 773) | |
| EVQLLESGGG LVQPGGSLRL SCAASGFTFS MYPMFWVRQA PGKGLEWVSY ISPSGGWTDY | 60 |
| ADSVKGRFTI SRDNSKNTLY LQMNSLRAED TAVYYCAKDR AYGDYVGWNG FDYWGQGTLV | 120 |
| TVSS | 124 |
| LC for Fab M274-C01 | |
| (SEQ ID NO: 774) | |
| QDIQMTQSPA TLSLSPGERA TLSCRASQSI SSFLAWYQQK PGQAPRLLIY DASYRATGIP | 60 |
| ARFSGSGSGT DFTLTISSLE PEDYAVYYCQ QRGNWPITFG QGTRLEIK | 108 |
| HC for Fab M274-C01 | |
| (SEQ ID NO: 775) | |
| EVQLLESGGG LVQPGGSLRL SCAASGFTFS MYPMFWVRQA PGKGLEWVSY IVPSGGWTDY | 60 |
| ADSVKGRFTI SRDNSKNTLY LQMNSLRAED TAVYYCAKDR AYGDYVGWNG FDYWGQGTLV | 120 |
| TVSS | 124 |
| LC for Fab M268-D03 | |
| (SEQ ID NO: 776) | |
| QDIQMTQSPA TLSLSPGERA TLSCRASQSI SSFLAWYQQK PGQAPRLLIY DASYRATGIP | 60 |
| ARFSGSGSGT DFTLTISSLE PEDYAVYYCQ QRGNWPITFG QGTRLEIK | 108 |
| HC for Fab M268-D03 | |
| (SEQ ID NO: 777) | |
| EVQLLESGGG LVQPGGSLRL SCAASGFTFS MYPMIWVRQA PGKGLEWVSY ISPSGGGTFY | 60 |
| ADSVKGRFTI SRDNSKNTLY LQMNSLRAED TAVYYCAKDR AYGDYVGWNG FDYWGQGTLV | 120 |
| TVSS | 124 |
| LC for Fab M272-H01 | |
| (SEQ ID NO: 778) | |
| QDIQMTQSPA TLSLSPGERA TLSCRASQSI SSFLAWYQQK PGQAPRLLIY DASYRATGIP | 60 |
| ARFSGSGSGT DFTLTISSLE PEDYAVYYCQ QRGNWPITFG QGTRLEIK | 108 |
| HC for Fab M272-H01 | |
| (SEQ ID NO: 779) | |
| EVQLLESGGG LVQPGGSLRL SCAASGFTFS MYPMIWVRQA PGKGLEWVSY IVPSGGFTGY | 60 |
| ADSVKGRFTI SRDNSKNTLY LQMNSLRAED TAVYYCAKDR AYGDYVGWNG FDYWGQGTLV | 120 |
| TVSS | 124 |
| LC for Fab M302-B06 | |
| (SEQ ID NO: 780) | |
| QDIQMTQSPA TLSLSPGERA TLSCRASQSI SSFLAWYQQK PGQAPRLLIY DASYRATGIP | 60 |
| ARFSGSGSGT DFTLTISSLE PEDYAVYYCQ QRGNWPITFG QGTRLEIK | 108 |
| HC for Fab M302-B06 | |
| (SEQ ID NO: 781) | |
| EVQLLESGGG LVQPGGSLRL SCAASGFTFS MYPMLWVRQA PGKGLEWVSY ISPSGGYTGY | 60 |
| ADSVKGRFTI SRDNSKNTLY LQMNSLRAED TAVYYCAKDR AYGDYVGWNG FDYWGQGTLV | 120 |
| TVSS | 124 |
| LC for Fab M270-B11 | |
| (SEQ ID NO: 782) | |
| QDIQMTQSPA TLSLSPGERA TLSCRASQSI SSFLAWYQQK PGQAPRLLIY DASYRATGIP | 60 |
| ARFSGSGSGT DFTLTISSLE PEDYAVYYCQ QRGNWPITFG QGTRLEIK | 108 |
| HC for Fab M270-B11 | |
| (SEQ ID NO: 783) | |
| EVQLLESGGG LVQPGGSLRL SCAASGFTFS MYPMTWVRQA PGKGLEWVSY ISPSGGYTGY | 60 |
| ADSVKGRFTI SRDNSKNTLY LQMNSLRAED TAVYYCAKDR AYGDYVGWNG FDYWGQGTLV | 120 |
| TVSS | 124 |
| LC for Fab M277-A10 | |
| (SEQ ID NO: 784) | |
| QDIQMTQSPA TLSLSPGERA TLSCRASQSI SSFLAWYQQK PGQAPRLLIY DASYRATGIP | 60 |
| ARFSGSGSGT DFTLTISSLE PEDYAVYYCQ QRGNWPITFG QGTRLEIK | 108 |
| HC for Fab M277-A10 | |
| (SEQ ID NO: 785) | |
| EVQLLESGGG LVQPGGSLRL SCAASGFTFS MYSMWWVRQA PGKGLEWVSV IYPSGGFTDY | 60 |
| ADSVKGRFTI SRDNSKNTLY LQMNSLRAED TAVYYCAKDR AYGDYVGWNG FDYWGQGTLV | 120 |
| TVSS | 124 |
| LC for Fab M302-G12 | |
| (SEQ ID NO: 786) | |
| QDIQMTQSPA TLSLSPGERA TLSCRASQSI SSFLAWYQQK PGQAPRLLIY DASYRATGIP | 60 |
| ARFSGSGSGT DFTLTISSLE PEDYAVYYCQ QRGNWPITFG QGTRLEIK | 108 |
| HC for Fab M302-G12 | |
| (SEQ ID NO: 787) | |
| EVQLLESGGG LVQPGGSLRL SCAASGFTFS MYWMLWVRQA PGKGLEWVSY ISPSGGGTFY | 60 |
| ADSVKGRFTI SRDNSKNTLY LQMNSLRAED TAVYYCAKDR AYGDYVGWNG FDYWGQGTLV | 120 |
| TVSS | 124 |
| LC for Fab M276-C01 | |
| (SEQ ID NO: 788) | |
| QDIQMTQSPA TLSLSPGERA TLSCRASQSI SSFLAWYQQK PGQAPRLLIY DASYRATGIP | 60 |
| ARFSGSGSGT DFTLTISSLE PEDYAVYYCQ QRGNWPITFG QGTRLEIK | 108 |
| HC for Fab M276-C01 | |
| (SEQ ID NO: 789) | |
| EVQLLESGGG LVQPGGSLRL SCAASGFTFS MYWMWWVRQA PGKGLEWVSS ISSSGGYTGY | 60 |
| ADSVKGRFTI SRDNSKNTLY LQMNSLRAED TAVYYCAKDR AYGDYVGWNG FDYWGQGTLV | 120 |
| TVSS | 124 |
| LC for Fab M276-E07 | |
| (SEQ ID NO: 790) | |
| QDIQMTQSPA TLSLSPGERA TLSCRASQSI SSFLAWYQQK PGQAPRLLIY DASYRATGIP | 60 |
| ARFSGSGSGT DFTLTISSLE PEDYAVYYCQ QRGNWPITFG QGTRLEIK | 108 |
| HC for Fab M276-E07 | |
| (SEQ ID NO: 791) | |
| EVQLLESGGG LVQPGGSLRL SCAASGFTFS NYAMWWVRQA PGKGLEWVSY ISPSGATYYA | 60 |
| DSVKGRFTIS RDNSKNTLYL QMNSLRAEDT AVYYCAKDRA YGDYVGWNGF DYWGQGTLVT | 120 |
| VSS | 123 |
| LC for Fab M268-C06 | |
| (SEQ ID NO: 792) | |
| QDIQMTQSPA TLSLSPGERA TLSCRASQSI SSFLAWYQQK PGQAPRLLIY DASYRATGIP | 60 |
| ARFSGSGSGT DFTLTISSLE PEDYAVYYCQ QRGNWPITFG QGTRLEIK | 108 |
| HC for Fab M268-C06 | |
| (SEQ ID NO: 793) | |
| EVQLLESGGG LVQPGGSLRL SCAASGFTFS NYAMWWVRQA PGKGLEWVSY ISPSGGSTYY | 60 |
| ADSVKGRFTI SRDNSKNTLY LQMNSLRAED TAVYYCAKDR AYGDYVGWNG FDYWGQGTLV | 120 |
| TVSS | 124 |
| LC for Fab M273-F02 | |
| (SEQ ID NO: 794) | |
| QDIQMTQSPA TLSLSPGERA TLSCRASQSI SSFLAWYQQK PGQAPRLLIY DASYRATGIP | 60 |
| ARFSGSGSGT DFTLTISSLE PEDYAVYYCQ QRGNWPITFG QGTRLEIK | 108 |
| HC for Fab M273-F02 | |
| (SEQ ID NO: 795) | |
| EVQLLESGGG LVQPGGSLRL SCAASGFTFS NYDMAWVRQA PGKGLEWVSW ISSSGGFTDY | 60 |
| ADSVKGRFTI SRDNSKNTLY LQMNSLRAED TAVYYCAKDR AYGDYVGWNG FDYWGQGTLV | 120 |
| TVSS | 124 |
| LC for Fab M270-B01 | |
| (SEQ ID NO: 796) | |
| QDIQMTQSPA TLSLSPGERA TLSCRASQSI SSFLAWYQQK PGQAPRLLIY DASYRATGIP | 60 |
| ARFSGSGSGT DFTLTISSLE PEDYAVYYCQ QRGNWPITFG QGTRLEIK | 108 |
| HC for Fab M270-B01 | |
| (SEQ ID NO: 797) | |
| EVQLLESGGG LVQPGGSLRL SCAASGFTFS NYDMIWVRQA PGKGLEWVSV ISPSGGWTSY | 60 |
| ADSVKGRFTI SRDNSKNTLY LQMNSLRAED TAVYYCAKDR AYGDYVGWNG FDYWGQGTLV | 120 |
| TVSS | 124 |
| LC for Fab M276-G04 | |
| (SEQ ID NO: 798) | |
| QDIQMTQSPA TLSLSPGERA TLSCRASQSI SSFLAWYQQK PGQAPRLLIY DASYRATGIP | 60 |
| ARFSGSGSGT DFTLTISSLE PEDYAVYYCQ QRGNWPITFG QGTRLEIK | 108 |
| HC for Fab M276-G04 | |
| (SEQ ID NO: 799) | |
| EVQLLESGGG LVQPGGSLRL SCAASGFTFS NYDMIWVRQA PGKGLEWVSY IVPSGGYTAY | 60 |
| ADSVKGRFTI SRDNSKNTLY LQMNSLRAED TAVYYCAKDR AYGDYVGWNG FDYWGQGTLV | 120 |
| TVSS | 124 |
| LC for Fab M270-H01 | |
| (SEQ ID NO: 800) | |
| QDIQMTQSPA TLSLSPGERA TLSCRASQSI SSFLAWYQQK PGQAPRLLIY DASYRATGIP | 60 |
| ARFSGSGSGT DFTLTISSLE PEDYAVYYCQ QRGNWPITFG QGTRLEIK | 108 |
| HC for Fab M270-H01 | |
| (SEQ ID NO: 801) | |
| EVQLLESGGG LVQPGGSLRL SCAASGFTFS NYDMWWVRQA PGKGLEWVSV ISPSGGFTGY | 60 |
| ADSVKGRFTI SRDNSKNTLY LQMNSLRAED TAVYYCAKDR AYGDYVGWNG FDYWGQGTLV | 120 |
| TVSS | 124 |
| LC for Fab M270-A10 | |
| (SEQ ID NO: 802) | |
| QDIQMTQSPA TLSLSPGERA TLSCRASQSI SSFLAWYQQK PGQAPRLLIY DASYRATGIP | 60 |
| ARFSGSGSGT DFTLTISSLE PEDYAVYYCQ QRGNWPITFG QGTRLEIK | 108 |
| HC for Fab M270-A10 | |
| (SEQ ID NO: 803) | |
| EVQLLESGGG LVQPGGSLRL SCAASGFTFS NYDMWWVRQA PGKGLEWVSV ISSSGGYTGY | 60 |
| ADSVKGRFTI SRDNSKNTLY LQMNSLRAED TAVYYCAKDR AYGDYVGWNG FDYWGQGTLV | 120 |
| TVSS | 124 |
| LC for Fab M269-A01 | |
| (SEQ ID NO: 804) | |
| QDIQMTQSPA TLSLSPGERA TLSCRASQSI SSFLAWYQQK PGQAPRLLIY DASYRATGIP | 60 |
| ARFSGSGSGT DFTLTISSLE PEDYAVYYCQ QRGNWPITFG QGTRLEIK | 108 |
| HC for Fab M269-A01 | |
| (SEQ ID NO: 805) | |
| EVQLLESGGG LVQPGGSLRL SCAASGFTFS NYDMWWVRQA PGKGLEWVSV ISSSGMTYYA | 60 |
| DSVKGRFTIS RDNSKNTLYL QMNSLRAEDT AVYYCAKDRA YGDYVGWNGF DYWGQGTLVT | 120 |
| VSS | 123 |
| LC for Fab M271-E06 | |
| (SEQ ID NO: 806) | |
| QDIQMTQSPA TLSLSPGERA TLSCRASQSI SSFLAWYQQK PGQAPRLLIY DASYRATGIP | 60 |
| ARFSGSGSGT DFTLTISSLE PEDYAVYYCQ QRGNWPITFG QGTRLEIK | 108 |
| HC for Fab M271-E06 | |
| (SEQ ID NO: 807) | |
| EVQLLESGGG LVQPGGSLRL SCAASGFTFS NYDMWWVRQA PGKGLEWVSV IVPSGGATYY | 60 |
| ADSVKGRFTI SRDNSKNTLY LQMNSLRAED TAVYYCAKDR AYGDYVGWNG FDYWGQGTLV | 120 |
| TVSS | 124 |
| LC for Fab M271-F01 | |
| (SEQ ID NO: 808) | |
| QDIQMTQSPA TLSLSPGERA TLSCRASQSI SSFLAWYQQK PGQAPRLLIY DASYRATGIP | 60 |
| ARFSGSGSGT DFTLTISSLE PEDYAVYYCQ QRGNWPITFG QGTRLEIK | 108 |
| HC for Fab M271-F01 | |
| (SEQ ID NO: 809) | |
| EVQLLESGGG LVQPGGSLRL SCAASGFTFS NYDMWWVRQA PGKGLEWVSV IYPSGGATFY | 60 |
| ADSVKGRFTI SRDNSKNTLY LQMNSLRAED TAVYYCAKDR AYGDYVGWNG FDYWGQGTLV | 120 |
| TVSS | 124 |
| LC for Fab M271-E04 | |
| (SEQ ID NO: 810) | |
| QDIQMTQSPA TLSLSPGERA TLSCRASQSI SSFLAWYQQK PGQAPRLLIY DASYRATGIP | 60 |
| ARFSGSGSGT DFTLTISSLE PEDYAVYYCQ QRGNWPITFG QGTRLEIK | 108 |
| HC for Fab M271-E04 | |
| (SEQ ID NO: 811) | |
| EVQLLESGGG LVQPGGSLRL SCAASGFTFS NYDMWWVRQA PGKGLEWVSV IYPSGGITYY | 60 |
| ADSVKGRFTI SRDNSKNTLY LQMNSLRAED TAVYYCAKDR AYGDYVGWNG FDYWGQGTLV | 120 |
| TVSS | 124 |
| LC for Fab M305-H10 | |
| (SEQ ID NO: 812) | |
| QDIQMTQSPA TLSLSPGERA TLSCRASQSI SSFLAWYQQK PGQAPRLLIY DASYRATGIP | 60 |
| ARFSGSGSGT DFTLTISSLE PEDYAVYYCQ QRGNWPITFG QGTRLEIK | 108 |
| HC for Fab M305-H10 | |
| (SEQ ID NO: 813) | |
| EVQLLESGGG LVQPGGSLRL SCAASGFTFS NYDMWWVRQA PGKGLEWVSV IYPSGGPTYY | 60 |
| ADSVKGRFTI SRDNSKNTLY LQMNSLRAED TAVYYCAKDR AYGDYVGWNG FDYWGQGTLV | 120 |
| TVSS | 124 |
| LC for Fab M272-D03 | |
| (SEQ ID NO: 814) | |
| QDIQMTQSPA TLSLSPGERA TLSCRASQSI SSFLAWYQQK PGQAPRLLIY DASYRATGIP | 60 |
| ARFSGSGSGT DFTLTISSLE PEDYAVYYCQ QRGNWPITFG QGTRLEIK | 108 |
| HC for Fab M272-D03 | |
| (SEQ ID NO: 815) | |
| EVQLLESGGG LVQPGGSLRL SCAASGFTFS NYDMWWVRQA PGKGLEWVSV IYPSGGYTVY | 60 |
| ADSVKGRFTI SRDNSKNTLY LQMNSLRAED TAVYYCAKDR AYGDYVGWNG FDYWGQGTLV | 120 |
| TVSS | 124 |
| LC for Fab M270-E12 | |
| (SEQ ID NO: 816) | |
| QDIQMTQSPA TLSLSPGERA TLSCRASQSI SSFLAWYQQK PGQAPRLLIY DASYRATGIP | 60 |
| ARFSGSGSGT DFTLTISSLE PEDYAVYYCQ QRGNWPITFG QGTRLEIK | 108 |
| HC for Fab M270-E12 | |
| (SEQ ID NO: 817) | |
| EVQLLESGGG LVQPGGSLRL SCAASGFTFS NYDMWWVRQA PGKGLEWVSV IYSSGGPTYY | 60 |
| ADSVKGRFTI SRDNSKNTLY LQMNSLRAED TAVYYCAKDR AYGDYVGWNG FDYWGQGTLV | 120 |
| TVSS | 124 |
| LC for Fab M299-A04 | |
| (SEQ ID NO: 818) | |
| QDIQMTQSPA TLSLSPGERA TLSCRASQSI SSFLAWYQQK PGQAPRLLIY DASYRATGIP | 60 |
| ARFSGSGSGT DFTLTISSLE PEDYAVYYCQ QRGNWPITFG QGTRLEIK | 108 |
| HC for Fab M299-A04 | |
| (SEQ ID NO: 819) | |
| EVQLLESGGG LVQPGGSLRL SCAASGFTFS NYDMWWVRQA PGKGLEWVSV IYSSGGYTAY | 60 |
| ADSVKGRFTI SRDNSKNTLY LQMNSLRAED TAVYYCAKDR AYGDYVGWNG FDYWGQGTLV | 120 |
| TVSS | 124 |
| LC for Fab M269-C03 | |
| (SEQ ID NO: 820) | |
| QDIQMTQSPA TLSLSPGERA TLSCRASQSI SSFLAWYQQK PGQAPRLLIY DASYRATGIP | 60 |
| ARFSGSGSGT DFTLTISSLE PEDYAVYYCQ QRGNWPITFG QGTRLEIK | 108 |
| HC for Fab M269-C03 | |
| (SEQ ID NO: 821) | |
| EVQLLESGGG LVQPGGSLRL SCAASGFTFS NYDMWWVRQA PGKGLEWVSW ISSSGGATIY | 60 |
| ADSVKGRFTI SRDNSKNTLY LQMNSLRAED TAVYYCAKDR AYGDYVGWNG FDYWGQGTLV | 120 |
| TVSS | 124 |
| LC for Fab M274-E09 | |
| (SEQ ID NO: 822) | |
| QDIQMTQSPA TLSLSPGERA TLSCRASQSI SSFLAWYQQK PGQAPRLLIY DASYRATGIP | 60 |
| ARFSGSGSGT DFTLTISSLE PEDYAVYYCQ QRGNWPITFG QGTRLEIK | 108 |
| HC for Fab M274-E09 | |
| (SEQ ID NO: 823) | |
| EVQLLESGGG LVQPGGSLRL SCAASGFTFS NYDMWWVRQA PGKGLEWVSY ISSSGGATLY | 60 |
| ADSVKGRFTI SRDNSKNTLY LQMNSLRAED TAVYYCAKDR AYGDYVGWNG FDYWGQGTLV | 120 |
| TVSS | 124 |
| LC for Fab M269-E04 | |
| (SEQ ID NO: 824) | |
| QDIQMTQSPA TLSLSPGERA TLSCRASQSI SSFLAWYQQK PGQAPRLLIY DASYRATGIP | 60 |
| ARFSGSGSGT DFTLTISSLE PEDYAVYYCQ QRGNWPITFG QGTRLEIK | 108 |
| HC for Fab M269-E04 | |
| (SEQ ID NO: 825) | |
| EVQLLESGGG LVQPGGSLRL SCAASGFTFS NYEMWWVRQA PGKGLEWVSV IYSSGSATFY | 60 |
| ADSVKGRFTI SRDNSKNTLY LQMNSLRAED TAVYYCAKDR AYGDYVGWNG FDYWGQGTLV | 120 |
| TVSS | 124 |
| LC for Fab M271-F07 | |
| (SEQ ID NO: 826) | |
| QDIQMTQSPA TLSLSPGERA TLSCRASQSI SSFLAWYQQK PGQAPRLLIY DASYRATGIP | 60 |
| ARFSGSGSGT DFTLTISSLE PEDYAVYYCQ QRGNWPITFG QGTRLEIK | 108 |
| HC for Fab M271-F07 | |
| (SEQ ID NO: 827) | |
| EVQLLESGGG LVQPGGSLRL SCAASGFTFS NYIMWWVRQA PGKGLEWVSS IYPSGGATLY | 60 |
| ADSVKGRFTI SRDNSKNTLY LQMNSLRAED TAVYYCAKDR AYGDYVGWNG FDYWGQGTLV | 120 |
| TVSS | 124 |
| LC for Fab M272-F12 | |
| (SEQ ID NO: 828) | |
| QDIQMTQSPA TLSLSPGERA TLSCRASQSI SSFLAWYQQK PGQAPRLLIY DASYRATGIP | 60 |
| ARFSGSGSGT DFTLTISSLE PEDYAVYYCQ QRGNWPITFG QGTRLEIK | 108 |
| HC for Fab M272-F12 | |
| (SEQ ID NO: 829) | |
| EVQLLESGGG LVQPGGSLRL SCAASGFTFS NYMMIWVRQA PGKGLEWVSS IYPSGGYTGY | 60 |
| ADSVKGRFTI SRDNSKNTLY LQMNSLRAED TAVYYCAKDR AYGDYVGWNG FDYWGQGTLV | 120 |
| TVSS | 124 |
| LC for Fab M272-C01 | |
| (SEQ ID NO: 830) | |
| QDIQMTQSPA TLSLSPGERA TLSCRASQSI SSFLAWYQQK PGQAPRLLIY DASYRATGIP | 60 |
| ARFSGSGSGT DFTLTISSLE PEDYAVYYCQ QRGNWPITFG QGTRLEIK | 108 |
| HC for Fab M272-C01 | |
| (SEQ ID NO: 831) | |
| EVQLLESGGG LVQPGGSLRL SCAASGFTFS NYMMIWVRQA PGKGLEWVSS IYSSGGFTSY | 60 |
| ADSVKGRFTI SRDNSKNTLY LQMNSLRAED TAVYYCAKDR AYGDYVGWNG FDYWGQGTLV | 120 |
| TVSS | 124 |
| LC for Fab M275-B11 | |
| (SEQ ID NO: 832) | |
| QDIQMTQSPA TLSLSPGERA TLSCRASQSI SSFLAWYQQK PGQAPRLLIY DASYRATGIP | 60 |
| ARFSGSGSGT DFTLTISSLE PEDYAVYYCQ QRGNWPITFG QGTRLEIK | 108 |
| HC for Fab M275-B11 | |
| (SEQ ID NO: 833) | |
| EVQLLESGGG LVQPGGSLRL SCAASGFTFS NYMMWWVRQA PGKGLEWVSS IGPSGGGTFY | 60 |
| ADSVKGRFTI SRDNSKNTLY LQMNSLRAED TAVYYCAKDR AYGDYVGWNG FDYWGQGTLV | 120 |
| TVSS | 124 |
| LC for Fab M275-F12 | |
| (SEQ ID NO: 834) | |
| QDIQMTQSPA TLSLSPGERA TLSCRASQSI SSFLAWYQQK PGQAPRLLIY DASYRATGIP | 60 |
| ARFSGSGSGT DFTLTISSLE PEDYAVYYCQ QRGNWPITFG QGTRLEIK | 108 |
| HC for Fab M275-F12 | |
| (SEQ ID NO: 835) | |
| EVQLLESGGG LVQPGGSLRL SCAASGFTFS NYMMWWVRQA PGKGLEWVSS IYSSGGGTFY | 60 |
| ADSVKGRFTI SRDNSKNTLY LQMNSLRAED TAVYYCAKDR AYGDYVGWNG FDYWGQGTLV | 120 |
| TVSS | 124 |
| LC for Fab M268-C10 | |
| (SEQ ID NO: 836) | |
| QDIQMTQSPA TLSLSPGERA TLSCRASQSI SSFLAWYQQK PGQAPRLLIY DASYRATGIP | 60 |
| ARFSGSGSGT DFTLTISSLE PEDYAVYYCQ QRGNWPITFG QGTRLEIK | 108 |
| HC for Fab M268-C10 | |
| (SEQ ID NO: 837) | |
| EVQLLESGGG LVQPGGSLRL SCAASGFTFS NYMMWWVRQA PGKGLEWVSV ISPSGGATYY | 60 |
| ADSVKGRFTI SRDNSKNTLY LQMNSLRAED TAVYYCAKDR AYGDYVGWNG FDYWGQGTLV | 120 |
| TVSS | 124 |
| LC for Fab M303-C05 | |
| (SEQ ID NO: 838) | |
| QDIQMTQSPA TLSLSPGERA TLSCRASQSI SSFLAWYQQK PGQAPRLLIY DASYRATGIP | 60 |
| ARFSGSGSGT DFTLTISSLE PEDYAVYYCQ QRGNWPITFG QGTRLEIK | 108 |
| HC for Fab M303-C05 | |
| (SEQ ID NO: 839) | |
| EVQLLESGGG LVQPGGSLRL SCAASGFTFS NYNMMWVRQA PGKGLEWVSY ISSSGGYTGY | 60 |
| ADSVKGRFTI SRDNSKNTLY LQMNSLRAED TAVYYCAKDR AYGDYVGWNG FDYWGQGTLV | 120 |
| TVSS | 124 |
| LC for Fab M274-E08 | |
| (SEQ ID NO: 840) | |
| QDIQMTQSPA TLSLSPGERA TLSCRASQSI SSFLAWYQQK PGQAPRLLIY DASYRATGIP | 60 |
| ARFSGSGSGT DFTLTISSLE PEDYAVYYCQ QRGNWPITFG QGTRLEIK | 108 |
| HC for Fab M274-E08 | |
| (SEQ ID NO: 841) | |
| EVQLLESGGG LVQPGGSLRL SCAASGFTFS NYNMWWVRQA PGKGLEWVSV IYPSGGPTFY | 60 |
| ADSVKGRFTI SRDNSKNTLY LQMNSLRAED TAVYYCAKDR AYGDYVGWNG FDYWGQGTLV | 120 |
| TVSS | 124 |
| LC for Fab M276-D12 | |
| (SEQ ID NO: 842) | |
| QDIQMTQSPA TLSLSPGERA TLSCRASQSI SSFLAWYQQK PGQAPRLLIY DASYRATGIP | 60 |
| ARFSGSGSGT DFTLTISSLE PEDYAVYYCQ QRGNWPITFG QGTRLEIK | 108 |
| HC for Fab M276-D12 | |
| (SEQ ID NO: 843) | |
| EVQLLESGGG LVQPGGSLRL SCAASGFTFS NYNMWWVRQA PGKGLEWVSY ISPSGGGTLY | 60 |
| ADSVKGRFTI SRDNSKNTLY LQMNSLRAED TAVYYCAKDR AYGDYVGWNG FDYWGQGTLV | 120 |
| TVSS | 124 |
| LC for Fab M299-A02 | |
| (SEQ ID NO: 844) | |
| QDIQMTQSPA TLSLSPGERA TLSCRASQSI SSFLAWYQQK PGQAPRLLIY DASYRATGIP | 60 |
| ARFSGSGSGT DFTLTISSLE PEDYAVYYCQ QRGNWPITFG QGTRLEIK | 108 |
| HC for Fab M299-A02 | |
| (SEQ ID NO: 845) | |
| EVQLLESGGG LVQPGGSLRL SCAASGFTFS NYPMFWVRQA PGKGLEWVSY ISPSGGWTSY | 60 |
| ADSVKGRFTI SRDNSKNTLY LQMNSLRAED TAVYYCAKDR AYGDYVGWNG FDYWGQGTLV | 120 |
| TVSS | 124 |
| LC for Fab M268-C05 | |
| (SEQ ID NO: 846) | |
| QDIQMTQSPA TLSLSPGERA TLSCRASQSI SSFLAWYQQK PGQAPRLLIY DASYRATGIP | 60 |
| ARFSGSGSGT DFTLTISSLE PEDYAVYYCQ QRGNWPITFG QGTRLEIK | 108 |
| HC for Fab M268-C05 | |
| (SEQ ID NO: 847) | |
| EVQLLESGGG LVQPGGSLRL SCAASGFTFS NYPMIWVRQA PGKGLEWVSY ISPSGGGTFY | 60 |
| ADSVKGRFTI SRDNSKNTLY LQMNSLRAED TAVYYCAKDR AYGDYVGWNG FDYWGQGTLV | 120 |
| TVSS | 124 |
| LC for Fab M276-H10 | |
| (SEQ ID NO: 848) | |
| QDIQMTQSPA TLSLSPGERA TLSCRASQSI SSFLAWYQQK PGQAPRLLIY DASYRATGIP | 60 |
| ARFSGSGSGT DFTLTISSLE PEDYAVYYCQ QRGNWPITFG QGTRLEIK | 108 |
| HC for Fab M276-H10 | |
| (SEQ ID NO: 849) | |
| EVQLLESGGG LVQPGGSLRL SCAASGFTFS NYPMIWVRQA PGKGLEWVSY ISSSGGYTGY | 60 |
| ADSVKGRFTI SRDNSKNTLY LQMNSLRAED TAVYYCAKDR AYGDYVGWNG FDYWGQGTLV | 120 |
| TVSS | 124 |
| LC for Fab M270-F10 | |
| (SEQ ID NO: 850) | |
| QDIQMTQSPA TLSLSPGERA TLSCRASQSI SSFLAWYQQK PGQAPRLLIY DASYRATGIP | 60 |
| ARFSGSGSGT DFTLTISSLE PEDYAVYYCQ QRGNWPITFG QGTRLEIK | 108 |
| HC for Fab M270-F10 | |
| (SEQ ID NO: 851) | |
| EVQLLESGGG LVQPGGSLRL SCAASGFTFS NYPMIWVRQA PGKGLEWVSY IVPSGGFTSY | 60 |
| ADSVKGRFTI SRDNSKNTLY LQMNSLRAED TAVYYCAKDR AYGDYVGWNG FDYWGQGTLV | 120 |
| TVSS | 124 |
| LC for Fab M271-F12 | |
| (SEQ ID NO: 852) | |
| QDIQMTQSPA TLSLSPGERA TLSCRASQSI SSFLAWYQQK PGQAPRLLIY DASYRATGIP | 60 |
| ARFSGSGSGT DFTLTISSLE PEDYAVYYCQ QRGNWPITFG QGTRLEIK | 108 |
| HC for Fab M271-F12 | |
| (SEQ ID NO: 853) | |
| EVQLLESGGG LVQPGGSLRL SCAASGFTFS NYPMIWVRQA PGKGLEWVSY IYPSGGGTYY | 60 |
| ADSVKGRFTI SRDNSKNTLY LQMNSLRAED TAVYYCAKDR AYGDYVGWNG FDYWGQGTLV | 120 |
| TVSS | 124 |
| LC for Fab M301-H08 | |
| (SEQ ID NO: 854) | |
| QDIQMTQSPA TLSLSPGERA TLSCRASQSI SSFLAWYQQK PGQAPRLLIY DASYRATGIP | 60 |
| ARFSGSGSGT DFTLTISSLE PEDYAVYYCQ QRGNWPITFG QGTRLEIK | 108 |
| HC for Fab M301-H08 | |
| (SEQ ID NO: 855) | |
| EVQLLESGGG LVQPGGSLRL SCAASGFTFS NYPMIWVRQA PGKGLEWVSY IYPSGGTFYA | 60 |
| DSVKGRFTIS RDNSKNTLYL QMNSLRAEDT AVYYCAKDRA YGDYVGWNGF DYWGQGTLVT | 120 |
| VSS | 123 |
| LC for Fab M304-D02 | |
| (SEQ ID NO: 856) | |
| QDIQMTQSPA TLSLSPGERA TLSCRASQSI SSFLAWYQQK PGQAPRLLIY DASYRATGIP | 60 |
| ARFSGSGSGT DFTLTISSLE PEDYAVYYCQ QRGNWPITFG QGTRLEIK | 108 |
| HC for Fab M304-D02 | |
| (SEQ ID NO: 857) | |
| EVQLLESGGG LVQPGGSLRL SCAASGFTFS NYPMWWVRQA PGKGLEWVSS ISPSGGSTYY | 60 |
| ADSVKGRFTI SRDNSKNTLY LQMNSLRAED TAVYYCAKDR AYGDYVGWNG FDYWGQGTLV | 120 |
| TVSS | 124 |
| LC for Fab M268-G02 | |
| (SEQ ID NO: 858) | |
| QDIQMTQSPA TLSLSPGERA TLSCRASQSI SSFLAWYQQK PGQAPRLLIY DASYRATGIP | 60 |
| ARFSGSGSGT DFTLTISSLE PEDYAVYYCQ QRGNWPITFG QGTRLEIK | 108 |
| HC for Fab M268-G02 | |
| (SEQ ID NO: 859) | |
| EVQLLESGGG LVQPGGSLRL SCAASGFTFS NYPMWWVRQA PGKGLEWVSS IVPSGGATYY | 60 |
| ADSVKGRFTI SRDNSKNTLY LQMNSLRAED TAVYYCAKDR AYGDYVGWNG FDYWGQGTLV | 120 |
| TVSS | 124 |
| LC for Fab M271-D07 | |
| (SEQ ID NO: 860) | |
| QDIQMTQSPA TLSLSPGERA TLSCRASQSI SSFLAWYQQK PGQAPRLLIY DASYRATGIP | 60 |
| ARFSGSGSGT DFTLTISSLE PEDYAVYYCQ QRGNWPITFG QGTRLEIK | 108 |
| HC for Fab M271-D07 | |
| (SEQ ID NO: 861) | |
| EVQLLESGGG LVQPGGSLRL SCAASGFTFS NYPMWWVRQA PGKGLEWVSS IYPSGGATFY | 60 |
| ADSVKGRFTI SRDNSKNTLY LQMNSLRAED TAVYYCAKDR AYGDYVGWNG FDYWGQGTLV | 120 |
| TVSS | 124 |
| LC for Fab M269-F06 | |
| QDIQMTQSPA TLSLSPGERA TLSCRASQSI SSFLAWYQQK PGQAPRLLIY DASYRATGIP | 60 |
| ARFSGSGSGT DFTLTISSLE PEDYAVYYCQ QRGNWPITFG QGTRLEIK | 108 |
| HC for Fab M269-F06 | |
| (SEQ ID NO: 863) | |
| EVQLLESGGG LVQPGGSLRL SCAASGFTFS NYPMWWVRQA PGKGLEWVSS IYPSGGKATY | 60 |
| YADSVKGRFT ISRDNSKNTL YLQMNSLRAE DTAVYYCAKD RAYGDYVGWN GFDYWGQGTL | 120 |
| VTVSS | 125 |
| LC for Fab M271-H11 | |
| (SEQ ID NO: 864) | |
| QDIQMTQSPA TLSLSPGERA TLSCRASQSI SSFLAWYQQK PGQAPRLLIY DASYRATGIP | 60 |
| ARFSGSGSGT DFTLTISSLE PEDYAVYYCQ QRGNWPITFG QGTRLEIK | 108 |
| HC for Fab M271-H11 | |
| (SEQ ID NO: 865) | |
| EVQLLESGGG LVQPGGSLRL SCAASGFTFS NYPMWWVRQA PGKGLEWVSS IYPSGGPTFY | 60 |
| ADSVKGRFTI SRDNSKNTLY LQMNSLRAED TAVYYCAKDR AYGDYVGWNG FDYWGQGTLV | 120 |
| TVSS | 124 |
| LC for Fab M275-F05 | |
| (SEQ ID NO: 866) | |
| QDIQMTQSPA TLSLSPGERA TLSCRASQSI SSFLAWYQQK PGQAPRLLIY DASYRATGIP | 60 |
| ARFSGSGSGT DFTLTISSLE PEDYAVYYCQ QRGNWPITFG QGTRLEIK | 108 |
| HC for Fab M275-F05 | |
| (SEQ ID NO: 867) | |
| EVQLLESGGG LVQPGGSLRL SCAASGFTFS NYPMWWVRQA PGKGLEWVSS IYSSGGATFY | 60 |
| ADSVKGRFTI SRDNSKNTLY LQMNSLRAED TAVYYCAKDR AYGDYVGWNG FDYWGQGTLV | 120 |
| TVSS | 124 |
| LC for Fab M300-H06 | |
| (SEQ ID NO: 868) | |
| QDIQMTQSPA TLSLSPGERA TLSCRASQSI SSFLAWYQQK PGQAPRLLIY DASYRATGIP | 60 |
| ARFSGSGSGT DFTLTISSLE PEDYAVYYCQ QRGNWPITFG QGTRLEIK | 108 |
| HC for Fab M300-H06 | |
| (SEQ ID NO: 869) | |
| EVQLLESGGG LVQPGGSLRL SCAASGFTFS NYPMWWVRQA PGKGLEWVSV IYPSGGYTAY | 60 |
| ADSVKGRFTI SRDNSKNTLY LQMNSLRAED TAVYYCAKDR AYGDYVGWNG FDYWGQGTLV | 120 |
| TVSS | 124 |
| LC for Fab M274-B07 | |
| (SEQ ID NO: 870) | |
| QDIQMTQSPA TLSLSPGERA TLSCRASQSI SSFLAWYQQK PGQAPRLLIY DASYRATGIP | 60 |
| ARFSGSGSGT DFTLTISSLE PEDYAVYYCQ QRGNWPITFG QGTRLEIK | 108 |
| HC for Fab M274-B07 | |
| (SEQ ID NO: 871) | |
| EVQLLESGGG LVQPGGSLRL SCAASGFTFS NYPMWWVRQA PGKGLEWVSY IGPSGGGTLY | 60 |
| ADSVKGRFTI SRDNSKNTLY LQMNSLRAED TAVYYCAKDR AYGDYVGWNG FDYWGQGTLV | 120 |
| TVSS | 124 |
| LC for Fab M269-A07 | |
| (SEQ ID NO: 872) | |
| QDIQMTQSPA TLSLSPGERA TLSCRASQSI SSFLAWYQQK PGQAPRLLIY DASYRATGIP | 60 |
| ARFSGSGSGT DFTLTISSLE PEDYAVYYCQ QRGNWPITFG QGTRLEIK | 108 |
| HC for Fab M269-A07 | |
| (SEQ ID NO: 873) | |
| EVQLLESGGG LVQPGGSLRL SCAASGFTFS NYPMWWVRQA PGKGLEWVSY IRPSGGPTWY | 60 |
| ADSVKGRFTI SRDNSKNTLY LQMNSLRAED TAVYYCAKDR AYGDYVGWNG FDYWGQGTLV | 120 |
| TVSS | 124 |
| LC for Fab M269-H04 | |
| (SEQ ID NO: 874) | |
| QDIQMTQSPA TLSLSPGERA TLSCRASQSI SSFLAWYQQK PGQAPRLLIY DASYRATGIP | 60 |
| ARFSGSGSGT DFTLTISSLE PEDYAVYYCQ QRGNWPITFG QGTRLEIK | 108 |
| HC for Fab M269-H04 | |
| (SEQ ID NO: 875) | |
| EVQLLESGGG LVQPGGSLRL SCAASGFTFS NYPMWWVRQA PGKGLEWVSY ISPSGGGTFY | 60 |
| ADSVKGRFTI SRDNSKNTLY LQMNSLRAED TAVYYCAKDR AYGDYVGWNG FDYWGQGTLV | 120 |
| TVSS | 124 |
| LC for Fab M306-H02 | |
| (SEQ ID NO: 876) | |
| QDIQMTQSPA TLSLSPGERA TLSCRASQSI SSFLAWYQQK PGQAPRLLIY DASYRATGIP | 60 |
| ARFSGSGSGT DFTLTISSLE PEDYAVYYCQ QRGNWPITFG QGTRLEIK | 108 |
| HC for Fab M306-H02 | |
| (SEQ ID NO: 877) | |
| EVQLLESGGG LVQPGGSLRL SCAASGFTFS NYPMWWVRQA PGKGLEWVSY ISPSGGGTLY | 60 |
| ADSVKGRFTI SRDNSKNTLY LQMNSLRAED TAVYYCAKDR AYGDYVGWNG FDYWGQGTLV | 120 |
| TVSS | 124 |
| LC for Fab M299-C09 | |
| (SEQ ID NO: 878) | |
| QDIQMTQSPA TLSLSPGERA TLSCRASQSI SSFLAWYQQK PGQAPRLLIY DASYRATGIP | 60 |
| ARFSGSGSGT DFTLTISSLE PEDYAVYYCQ QRGNWPITFG QGTRLEIK | 108 |
| HC for Fab M299-C09 | |
| (SEQ ID NO: 879) | |
| EVQLLESGGG LVQPGGSLRL SCAASGFTFS NYPMWWVRQA PGKGLEWVSY IVPSGGATFY | 60 |
| ADSVKGRFTI SRDNSKNTLY LQMNSLRAED TAVYYCAKDR AYGDYVGWNG FDYWGQGTLV | 120 |
| TVSS | 124 |
| LC for Fab M274-D06 | |
| (SEQ ID NO: 880) | |
| QDIQMTQSPA TLSLSPGERA TLSCRASQSI SSFLAWYQQK PGQAPRLLIY DASYRATGIP | 60 |
| ARFSGSGSGT DFTLTISSLE PEDYAVYYCQ QRGNWPITFG QGTRLEIK | 108 |
| HC for Fab M274-D06 | |
| (SEQ ID NO: 881) | |
| EVQLLESGGG LVQPGGSLRL SCAASGFTFS NYPMWWVRQA PGKGLEWVSY IVPSGGMTYY | 60 |
| ADSVKGRFTI SRDNSKNTLY LQMNSLRAED TAVYYCAKDR AYGDYVGWNG FDYWGQGTLV | 120 |
| TVSS | 124 |
| LC for Fab M303-C12 | |
| (SEQ ID NO: 882) | |
| QDIQMTQSPA TLSLSPGERA TLSCRASQSI SSFLAWYQQK PGQAPRLLIY DASYRATGIP | 60 |
| ARFSGSGSGT DFTLTISSLE PEDYAVYYCQ QRGNWPITFG QGTRLEIK | 108 |
| HC for Fab M303-C12 | |
| (SEQ ID NO: 883) | |
| EVQLLESGGG LVQPGGSLRL SCAASGFTFS NYSMWWVRQA PGKGLEWVSV IYPSGGYTSY | 60 |
| ADSVKGRFTI SRDNSKNTLY LQMNSLRAED TAVYYCAKDR AYGDYVGWNG FDYWGQGTLV | 120 |
| TVSS | 124 |
| LC for Fab M273-D11 | |
| (SEQ ID NO: 884) | |
| QDIQMTQSPA TLSLSPGERA TLSCRASQSI SSFLAWYQQK PGQAPRLLIY DASYRATGIP | 60 |
| ARFSGSGSGT DFTLTISSLE PEDYAVYYCQ QRGNWPITFG QGTRLEIK | 108 |
| HC for Fab M273-D11 | |
| (SEQ ID NO: 885) | |
| EVQLLESGGG LVQPGGSLRL SCAASGFTFS NYYMIWVRQA PGKGLEWVSY ISPSGGGTYY | 60 |
| ADSVKGRFTI SRDNSKNTLY LQMNSLRAED TAVYYCAKDR AYGDYVGWNG FDYWGQGTLV | 120 |
| TVSS | 124 |
| LC for Fab M268-G04 | |
| (SEQ ID NO: 886) | |
| QDIQMTQSPA TLSLSPGERA TLSCRASQSI SSFLAWYQQK PGQAPRLLIY DASYRATGIP | 60 |
| ARFSGSGSGT DFTLTISSLE PEDYAVYYCQ QRGNWPITFG QGTRLEIK | 108 |
| HC for Fab M268-G04 | |
| (SEQ ID NO: 887) | |
| EVQLLESGGG LVQPGGSLRL SCAASGFTFS PYAMWWVRQA PGKGLEWVSY ISSSGGGTFY | 60 |
| ADSVKGRFTI SRDNSKNTLY LQMNSLRAED TAVYYCAKDR AYGDYVGWNG FDYWGQGTLV | 120 |
| TVSS | 124 |
| LC for Fab M299-D01 | |
| (SEQ ID NO: 888) | |
| QDIQMTQSPA TLSLSPGERA TLSCRASQSI SSFLAWYQQK PGQAPRLLIY DASYRATGIP | 60 |
| ARFSGSGSGT DFTLTISSLE PEDYAVYYCQ QRGNWPITFG QGTRLEIK | 108 |
| HC for Fab M299-D01 | |
| (SEQ ID NO: 889) | |
| EVQLLESGGG LVQPGGSLRL SCAASGFTFS PYDMWWVRQA PGKGLEWVSV ISPSGGATFY | 60 |
| ADSVKGRFTI SRDNSKNTLY LQMNSLRAED TAVYYCAKDR AYGDYVGWNG FDYWGQGTLV | 120 |
| TVSS | 124 |
| LC for Fab M303-G04 | |
| (SEQ ID NO: 890) | |
| QDIQMTQSPA TLSLSPGERA TLSCRASQSI SSFLAWYQQK PGQAPRLLIY DASYRATGIP | 60 |
| ARFSGSGSGT DFTLTISSLE PEDYAVYYCQ QRGNWPITFG QGTRLEIK | 108 |
| HC for Fab M303-G04 | |
| (SEQ ID NO: 891) | |
| EVQLLESGGG LVQPGGSLRL SCAASGFTFS PYDMWWVRQA PGKGLEWVSV ISPSGGYTGY | 60 |
| ADSVKGRFTI SRDNSKNTLY LQMNSLRAED TAVYYCAKDR AYGDYVGWNG FDYWGQGTLV | 120 |
| TVSS | 124 |
| LC for Fab M271-C05 | |
| (SEQ ID NO: 892) | |
| QDIQMTQSPA TLSLSPGERA TLSCRASQSI SSFLAWYQQK PGQAPRLLIY DASYRATGIP | 60 |
| ARFSGSGSGT DFTLTISSLE PEDYAVYYCQ QRGNWPITFG QGTRLEIK | 108 |
| HC for Fab M271-C05 | |
| (SEQ ID NO: 893) | |
| EVQLLESGGG LVQPGGSLRL SCAASGFTFS PYDMWWVRQA PGKGLEWVSV ISSSGGFTDY | 60 |
| ADSVKGRFTI SRDNSKNTLY LQMNSLRAED TAVYYCAKDR AYGDYVGWNG FDYWGQGTLV | 120 |
| TVSS | 124 |
| LC for Fab M271-F04 | |
| (SEQ ID NO: 894) | |
| QDIQMTQSPA TLSLSPGERA TLSCRASQSI SSFLAWYQQK PGQAPRLLIY DASYRATGIP | 60 |
| ARFSGSGSGT DFTLTISSLE PEDYAVYYCQ QRGNWPITFG QGTRLEIK | 108 |
| HC for Fab M271-F04 | |
| (SEQ ID NO: 895) | |
| EVQLLESGGG LVQPGGSLRL SCAASGFTFS PYMMFWVRQA PGKGLEWVSS ISSSGGGTFY | 60 |
| ADSVKGRFTI SRDNSKNTLY LQMNSLRAED TAVYYCAKDR AYGDYVGWNG FDYWGQGTLV | 120 |
| TVSS | 124 |
| LC for Fab M275-E05 | |
| (SEQ ID NO: 896) | |
| QDIQMTQSPA TLSLSPGERA TLSCRASQSI SSFLAWYQQK PGQAPRLLIY DASYRATGIP | 60 |
| ARFSGSGSGT DFTLTISSLE PEDYAVYYCQ QRGNWPITFG QGTRLEIK | 108 |
| HC for Fab M275-E05 | |
| (SEQ ID NO: 897) | |
| EVQLLESGGG LVQPGGSLRL SCAASGFTFS PYMMIWVRQA PGKGLEWVSS ISSSGGYTGY | 60 |
| ADSVKGRFTI SRDNSKNTLY LQMNSLRAED TAVYYCAKDR AYGDYVGWNG FDYWGQGTLV | 120 |
| TVSS | 124 |
| LC for Fab M269-H12 | |
| (SEQ ID NO: 898) | |
| QDIQMTQSPA TLSLSPGERA TLSCRASQSI SSFLAWYQQK PGQAPRLLIY DASYRATGIP | 60 |
| ARFSGSGSGT DFTLTISSLE PEDYAVYYCQ QRGNWPITFG QGTRLEIK | 108 |
| HC for Fab M269-H12 | |
| (SEQ ID NO: 899) | |
| EVQLLESGGG LVQPGGSLRL SCAASGFTFS PYMMSWVRQA PGKGLEWVSS IYSSGGATFY | 60 |
| ADSVKGRFTI SRDNSKNTLY LQMNSLRAED TAVYYCAKDR AYGDYVGWNG FDYWGQGTLV | 120 |
| TVSS | 124 |
| LC for Fab M270-C02 | |
| (SEQ ID NO: 900) | |
| QDIQMTQSPA TLSLSPGERA TLSCRASQSI SSFLAWYQQK PGQAPRLLIY DASYRATGIP | 60 |
| ARFSGSGSGT DFTLTISSLE PEDYAVYYCQ QRGNWPITFG QGTRLEIK | 108 |
| HC for Fab M270-C02 | |
| (SEQ ID NO: 901) | |
| EVQLLESGGG LVQPGGSLRL SCAASGFTFS PYMMWWVRQA PGKGLEWVSS ISSSGGGTFY | 60 |
| ADSVKGRFTI SRDNSKNTLY LQMNSLRAED TAVYYCAKDR AYGDYVGWNG FDYWGQGTLV | 120 |
| TVSS | 124 |
| LC for Fab M272-F09 | |
| (SEQ ID NO: 902) | |
| QDIQMTQSPA TLSLSPGERA TLSCRASQSI SSFLAWYQQK PGQAPRLLIY DASYRATGIP | 60 |
| ARFSGSGSGT DFTLTISSLE PEDYAVYYCQ QRGNWPITFG QGTRLEIK | 108 |
| HC for Fab M272-F09 | |
| (SEQ ID NO: 903) | |
| EVQLLESGGG LVQPGGSLRL SCAASGFTFS PYNMWWVRQA PGKGLEWVSV IYPSGGATFY | 60 |
| ADSVKGRFTI SRDNSKNTLY LQMNSLRAED TAVYYCAKDR AYGDYVGWNG FDYWGQGTLV | 120 |
| TVSS | 124 |
| LC for Fab M275-F04 | |
| (SEQ ID NO: 904) | |
| QDIQMTQSPA TLSLSPGERA TLSCRASQSI SSFLAWYQQK PGQAPRLLIY DASYRATGIP | 60 |
| ARFSGSGSGT DFTLTISSLE PEDYAVYYCQ QRGNWPITFG QGTRLEIK | 108 |
| HC for Fab M275-F04 | |
| (SEQ ID NO: 905) | |
| EVQLLESGGG LVQPGGSLRL SCAASGFTFS PYPMFWVRQA PGKGLEWVSS ISPSGGATYY | 60 |
| ADSVKGRFTI SRDNSKNTLY LQMNSLRAED TAVYYCAKDR AYGDYVGWNG FDYWGQGTLV | 120 |
| TVSS | 124 |
| LC for Fab M305-G11 | |
| (SEQ ID NO: 906) | |
| QDIQMTQSPA TLSLSPGERA TLSCRASQSI SSFLAWYQQK PGQAPRLLIY DASYRATGIP | 60 |
| ARFSGSGSGT DFTLTISSLE PEDYAVYYCQ QRGNWPITFG QGTRLEIK | 108 |
| HC for Fab M305-G11 | |
| (SEQ ID NO: 907) | |
| EVQLLESGGG LVQPGGSLRL SCAASGFTFS PYPMIWVRQA PGKGLEWVSY IGSSGGYTSY | 60 |
| ADSVKGRFTI SRDNSKNTLY LQMNSLRAED TAVYYCAKDR AYGDYVGWNG FDYWGQGTLV | 120 |
| TVSS | 124 |
| LC for Fab M269-C10 | |
| (SEQ ID NO: 908) | |
| QDIQMTQSPA TLSLSPGERA TLSCRASQSI SSFLAWYQQK PGQAPRLLIY DASYRATGIP | 60 |
| ARFSGSGSGT DFTLTISSLE PEDYAVYYCQ QRGNWPITFG QGTRLEIK | 108 |
| HC for Fab M269-C10 | |
| (SEQ ID NO: 909) | |
| EVQLLESGGG LVQPGGSLRL SCAASGFTFS PYPMIWVRQA PGKGLEWVSY ISPSGGFTDY | 60 |
| ADSVKGRFTI SRDNSKNTLY LQMNSLRAED TAVYYCAKDR AYGDYVGWNG FDYWGQGTLV | 120 |
| TVSS | 124 |
| LC for Fab M277-A04 | |
| (SEQ ID NO: 910) | |
| QDIQMTQSPA TLSLSPGERA TLSCRASQSI SSFLAWYQQK PGQAPRLLIY DASYRATGIP | 60 |
| ARFSGSGSGT DFTLTISSLE PEDYAVYYCQ QRGNWPITFG QGTRLEIK | 108 |
| HC for Fab M277-A04 | |
| (SEQ ID NO: 911) | |
| EVQLLESGGG LVQPGGSLRL SCAASGFTFS PYPMIWVRQA PGKGLEWVSY ISPSGGGTFY | 60 |
| ADSVKGRFTI SRDNSKNTLY LQMNSLRAED TAVYYCAKDR AYGDYVGWNG FDYWGQGTLV | 120 |
| TVSS | 124 |
| LC for Fab M274-G05 | |
| (SEQ ID NO: 912) | |
| QDIQMTQSPA TLSLSPGERA TLSCRASQSI SSFLAWYQQK PGQAPRLLIY DASYRATGIP | 60 |
| ARFSGSGSGT DFTLTISSLE PEDYAVYYCQ QRGNWPITFG QGTRLEIK | 108 |
| HC for Fab M274-G05 | |
| (SEQ ID NO: 913) | |
| EVQLLESGGG LVQPGGSLRL SCAASGFTFS PYPMIWVRQA PGKGLEWVSY ISSSGGGTYY | 60 |
| ADSVKGRFTI SRDNSKNTLY LQMNSLRAED TAVYYCAKDR AYGDYVGWNG FDYWGQGTLV | 120 |
| TVSS | 124 |
| LC for Fab M271-F10 | |
| (SEQ ID NO: 914) | |
| QDIQMTQSPA TLSLSPGERA TLSCRASQSI SSFLAWYQQK PGQAPRLLIY DASYRATGIP | 60 |
| ARFSGSGSGT DFTLTISSLE PEDYAVYYCQ QRGNWPITFG QGTRLEIK | 108 |
| HC for Fab M271-F10 | |
| (SEQ ID NO: 915) | |
| EVQLLESGGG LVQPGGSLRL SCAASGFTFS PYPMIWVRQA PGKGLEWVSY ISSSGGYTDY | 60 |
| ADSVKGRFTI SRDNSKNTLY LQMNSLRAED TAVYYCAKDR AYGDYVGWNG FDYWGQGTLV | 120 |
| TVSS | 124 |
| LC for Fab M301-E12 | |
| (SEQ ID NO: 916) | |
| QDIQMTQSPA TLSLSPGERA TLSCRASQSI SSFLAWYQQK PGQAPRLLIY DASYRATGIP | 60 |
| ARFSGSGSGT DFTLTISSLE PEDYAVYYCQ QRGNWPITFG QGTRLEIK | 108 |
| HC for Fab M301-E12 | |
| (SEQ ID NO: 917) | |
| EVQLLESGGG LVQPGGSLRL SCAASGFTFS PYPMWWVRQA PGKGLEWVSY ISPSGGWTDY | 60 |
| ADSVKGRFTI SRDNSKNTLY LQMNSLRAED TAVYYCAKDR AYGDYVGWNG FDYWGQGTLV | 120 |
| TVSS | 124 |
| LC for Fab M271-C03 | |
| (SEQ ID NO: 918) | |
| QDIQMTQSPA TLSLSPGERA TLSCRASQSI SSFLAWYQQK PGQAPRLLIY DASYRATGIP | 60 |
| ARFSGSGSGT DFTLTISSLE PEDYAVYYCQ QRGNWPITFG QGTRLEIK | 108 |
| HC for Fab M271-C03 | |
| (SEQ ID NO: 919) | |
| EVQLLESGGG LVQPGGSLRL SCAASGFTFS PYPMWWVRQA PGKGLEWVSY IVPSGGKTFY | 60 |
| ADSVKGRFTI SRDNSKNTLY LQMNSLRAED TAVYYCAKDR AYGDYVGWNG FDYWGQGTLV | 120 |
| TVSS | 124 |
| LC for Fab M274-C08 | |
| (SEQ ID NO: 920) | |
| QDIQMTQSPA TLSLSPGERA TLSCRASQSI SSFLAWYQQK PGQAPRLLIY DASYRATGIP | 60 |
| ARFSGSGSGT DFTLTISSLE PEDYAVYYCQ QRGNWPITFG QGTRLEIK | 108 |
| HC for Fab M274-C08 | |
| (SEQ ID NO: 921) | |
| EVQLLESGGG LVQPGGSLRL SCAASGFTFS QYAMIWVRQA PGKGLEWVSY ISPSGGYTGY | 60 |
| ADSVKGRFTI SRDNSKNTLY LQMNSLRAED TAVYYCAKDR AYGDYVGWNG FDYWGQGTLV | 120 |
| TVSS | 124 |
| LC for Fab M274-G04 | |
| (SEQ ID NO: 922) | |
| QDIQMTQSPA TLSLSPGERA TLSCRASQSI SSFLAWYQQK PGQAPRLLIY DASYRATGIP | 60 |
| ARFSGSGSGT DFTLTISSLE PEDYAVYYCQ QRGNWPITFG QGTRLEIK | 108 |
| HC for Fab M274-G04 | |
| (SEQ ID NO: 923) | |
| EVQLLESGGG LVQPGGSLRL SCAASGFTFS QYDMIWVRQA PGKGLEWVSY IGSSGGSTIY | 60 |
| ADSVKGRFTI SRDNSKNTLY LQMNSLRAED TAVYYCAKDR AYGDYVGWNG FDYWGQGTLV | 120 |
| TVSS | 124 |
| LC for Fab M274-B05 | |
| (SEQ ID NO: 924) | |
| QDIQMTQSPA TLSLSPGERA TLSCRASQSI SSFLAWYQQK PGQAPRLLIY DASYRATGIP | 60 |
| ARFSGSGSGT DFTLTISSLE PEDYAVYYCQ QRGNWPITFG QGTRLEIK | 108 |
| HC for Fab M274-B05 | |
| (SEQ ID NO: 925) | |
| EVQLLESGGG LVQPGGSLRL SCAASGFTFS QYDMWWFRQA PGKGLEWVSV ISPSGGHTSY | 60 |
| ADSVKGRFTI SRDNSKNTLY LQMNSLRAED TAVYYCAKDR AYGDYVGWNG FDYWGQGTLV | 120 |
| TVSS | 124 |
| LC for Fab M270-D11 | |
| (SEQ ID NO: 926) | |
| QDIQMTQSPA TLSLSPGERA TLSCRASQSI SSFLAWYQQK PGQAPRLLIY DASYRATGIP | 60 |
| ARFSGSGSGT DFTLTISSLE PEDYAVYYCQ QRGNWPITFG QGTRLEIK | 108 |
| HC for Fab M270-D11 | |
| (SEQ ID NO: 927) | |
| EVQLLESGGG LVQPGGSLRL SCAASGFTFS QYDMWWVRQA PGKGLEWVSV ISSSGGATWY | 60 |
| ADSVKGRFTI SRDNSKNTLY LQMNSLRAED TAVYYCAKDR AYGDYVGWNG FDYWGQGTLV | 120 |
| TVSS | 124 |
| LC for Fab M276-A01 | |
| (SEQ ID NO: 928) | |
| QDIQMTQSPA TLSLSPGERA TLSCRASQSI SSFLAWYQQK PGQAPRLLIY DASYRATGIP | 60 |
| ARFSGSGSGT DFTLTISSLE PEDYAVYYCQ QRGNWPITFG QGTRLEIK | 108 |
| HC for Fab M276-A01 | |
| (SEQ ID NO: 929) | |
| EVQLLESGGG LVQPGGSLRL SCAASGFTFS QYDMWWVRQA PGKGLEWVSV IYPSGGPTFY | 60 |
| ADSVKGRFTI SRDNSKNTLY LQMNSLRAED TAVYYCAKDR AYGDYVGWNG FDYWGQGTLV | 120 |
| TVSS | 124 |
| LC for Fab M269-F11 | |
| (SEQ ID NO: 930) | |
| QDIQMTQSPA TLSLSPGERA TLSCRASQSI SSFLAWYQQK PGQAPRLLIY DASYRATGIP | 60 |
| ARFSGSGSGT DFTLTISSLE PEDYAVYYCQ QRGNWPITFG QGTRLEIK | 108 |
| HC for Fab M269-F11 | |
| (SEQ ID NO: 931) | |
| EVQLLESGGG LVQPGGSLRL SCAASGFTFS QYDMWWVRQA PGKGLEWVSV IYPSGGTTFY | 60 |
| ADSVKGRFTI SRDNSKNTLY LQMNSLRAED TAVYYCAKDR AYGDYVGWNG FDYWGQGTLV | 120 |
| TVSS | 124 |
| LC for Fab M276-B07 | |
| (SEQ ID NO: 932) | |
| QDIQMTQSPA TLSLSPGERA TLSCRASQSI SSFLAWYQQK PGQAPRLLIY DASYRATGIP | 60 |
| ARFSGSGSGT DFTLTISSLE PEDYAVYYCQ QRGNWPITFG QGTRLEIK | 108 |
| HC for Fab M276-B07 | |
| (SEQ ID NO: 933) | |
| EVQLLESGGG LVQPGGSLRL SCAASGFTFS QYDMWWVRQA PGKGLEWVSV IYPSGGYTDY | 60 |
| ADSVKGRFTI SRDNSKNTLY LQMNSLRAED TAVYYCAKDR AYGDYVGWNG FDYWGQGTLV | 120 |
| TVSS | 124 |
| LC for Fab M275-D03 | |
| (SEQ ID NO: 934) | |
| QDIQMTQSPA TLSLSPGERA TLSCRASQSI SSFLAWYQQK PGQAPRLLIY DASYRATGIP | 60 |
| ARFSGSGSGT DFTLTISSLE PEDYAVYYCQ QRGNWPITFG QGTRLEIK | 108 |
| HC for Fab M275-D03 | |
| (SEQ ID NO: 935) | |
| EVQLLESGGG LVQPGGSLRL SCAASGFTFS QYDMWWVRQA PGKGLEWVSV IYPSGTTFYA | 60 |
| DSVKGRFTIS RDNSKNTLYL QMNSLRAEDT AVYYCAKDRA YGDYVGWNGF DYWGQGTLVT | 120 |
| VSS | 123 |
| LC for Fab M268-F07 | |
| (SEQ ID NO: 936) | |
| QDIQMTQSPA TLSLSPGERA TLSCRASQSI SSFLAWYQQK PGQAPRLLIY DASYRATGIP | 60 |
| ARFSGSGSGT DFTLTISSLE PEDYAVYYCQ QRGNWPITFG QGTRLEIK | 108 |
| HC for Fab M268-F07 | |
| (SEQ ID NO: 937) | |
| EVQLLESGGG LVQPGGSLRL SCAASGFTFS QYDMWWVRQA PGKGLEWVSY IVPSGGFTDY | 60 |
| ADSVKGRFTI SRDNSKNTLY LQMNSLRAED TAVYYCAKDR AYGDYVGWNG FDYWGQGTLV | 120 |
| TVSS | 124 |
| LC for Fab M268-H01 | |
| (SEQ ID NO: 938) | |
| QDIQMTQSPA TLSLSPGERA TLSCRASQSI SSFLAWYQQK PGQAPRLLIY DASYRATGIP | 60 |
| ARFSGSGSGT DFTLTISSLE PEDYAVYYCQ QRGNWPITFG QGTRLEIK | 108 |
| HC for Fab M268-H01 | |
| (SEQ ID NO: 939) | |
| EVQLLESGGG LVQPGGSLRL SCAASGFTFS QYGMWWVRQA PGKGLEWVSY IYPSGGGTYY | 60 |
| ADSVKGRFTI SRDNSKNTLY LQMNSLRAED TAVYYCAKDR AYGDYVGWNG FDYWGQGTLV | 120 |
| TVSS | 124 |
| LC for Fab M271-B11 | |
| (SEQ ID NO: 940) | |
| QDIQMTQSPA TLSLSPGERA TLSCRASQSI SSFLAWYQQK PGQAPRLLIY DASYRATGIP | 60 |
| ARFSGSGSGT DFTLTISSLE PEDYAVYYCQ QRGNWPITFG QGTRLEIK | 108 |
| HC for Fab M271-B11 | |
| (SEQ ID NO: 941) | |
| EVQLLESGGG LVQPGGSLRL SCAASGFTFS QYMMIWVRQA PGKGLEWVSY IVPSGGTTGY | 60 |
| ADSVKGRFTI SRDNSKNTLY LQMNSLRAED TAVYYCAKDR AYGDYVGWNG FDYWGQGTLV | 120 |
| TVSS | 124 |
| LC for Fab M270-H12 | |
| (SEQ ID NO: 942) | |
| QDIQMTQSPA TLSLSPGERA TLSCRASQSI SSFLAWYQQK PGQAPRLLIY DASYRATGIP | 60 |
| ARFSGSGSGT DFTLTISSLE PEDYAVYYCQ QRGNWPITFG QGTRLEIK | 108 |
| HC for Fab M270-H12 | |
| (SEQ ID NO: 943) | |
| EVQLLESGGG LVQPGGSLRL SCAASGFTFS QYPMFWVRQA PGKGLEWVSY IVPSGGYTSY | 60 |
| ADSVKGRFTI SRDNSKNTLY LQMNSLRAED TAVYYCAKDR AYGDYVGWNG FDYWGQGTLV | 120 |
| TVSS | 124 |
| LC for Fab M273-C06 | |
| (SEQ ID NO: 944) | |
| QDIQMTQSPA TLSLSPGERA TLSCRASQSI SSFLAWYQQK PGQAPRLLIY DASYRATGIP | 60 |
| ARFSGSGSGT DFTLTISSLE PEDYAVYYCQ QRGNWPITFG QGTRLEIK | 108 |
| HC for Fab M273-C06 | |
| (SEQ ID NO: 945) | |
| EVQLLESGGG LVQPGGSLRL SCAASGFTFS QYPMIWVRQA PGKGLEWVSY IVPSGGWTSY | 60 |
| ADSVKGRFTI SRDNSKNTLY LQMNSLRAED TAVYYCAKDR AYGDYVGWNG FDYWGQGTLV | 120 |
| TVSS | 124 |
| LC for Fab M277-F05 | |
| (SEQ ID NO: 946) | |
| QDIQMTQSPA TLSLSPGERA TLSCRASQSI SSFLAWYQQK PGQAPRLLIY DASYRATGIP | 60 |
| ARFSGSGSGT DFTLTISSLE PEDYAVYYCQ QRGNWPITFG QGTRLEIK | 108 |
| HC for Fab M277-F05 | |
| (SEQ ID NO: 947) | |
| EVQLLESGGG LVQPGGSLRL SCAASGFTFS QYPMMWVRQA PGKGLEWVSY IYPSGGATYY | 60 |
| ADSVKGRFTI SRDNSKNTLY LQMNSLRAED TAVYYCAKDR AYGDYVGWNG FDYWGQGTLV | 120 |
| TVSS | 124 |
| LC for Fab M273-C12 | |
| (SEQ ID NO: 948) | |
| QDIQMTQSPA TLSLSPGERA TLSCRASQSI SSFLAWYQQK PGQAPRLLIY DASYRATGIP | 60 |
| ARFSGSGSGT DFTLTISSLE PEDYAVYYCQ QRGNWPITFG QGTRLEIK | 108 |
| HC for Fab M273-C12 | |
| (SEQ ID NO: 949) | |
| EVQLLESGGG LVQPGGSLRL SCAASGFTFS QYPMMWVRQA PGKGLEWVSY IYPSGGGTYY | 60 |
| ADSVKGRFTI SRDNSKNTLY LQMNSLRAED TAVYYCAKDR AYGDYVGWNG FDYWGQGTLV | 120 |
| TVSS | 124 |
| LC for Fab M275-F11 | |
| (SEQ ID NO: 950) | |
| QDIQMTQSPA TLSLSPGERA TLSCRASQSI SSFLAWYQQK PGQAPRLLIY DASYRATGIP | 60 |
| ARFSGSGSGT DFTLTISSLE PEDYAVYYCQ QRGNWPITFG QGTRLEIK | 108 |
| HC for Fab M275-F11 | |
| (SEQ ID NO: 951) | |
| EVQLLESGGG LVQPGGSLRL SCAASGFTFS QYPMWWVRQA PGKGLEWVSS ISPSGGATYY | 60 |
| ADSVKGRFTI SRDNSKNTLY LQMNSLRAED TAVYYCAKDR AYGDYVGWNG FDYWGQGTLV | 120 |
| TVSS | 124 |
| LC for Fab M268-C02 | |
| (SEQ ID NO: 952) | |
| QDIQMTQSPA TLSLSPGERA TLSCRASQSI SSFLAWYQQK PGQAPRLLIY DASYRATGIP | 60 |
| ARFSGSGSGT DFTLTISSLE PEDYAVYYCQ QRGNWPITFG QGTRLEIK | 108 |
| HC for Fab M268-C02 | |
| (SEQ ID NO: 953) | |
| EVQLLESGGG LVQPGGSLRL SCAASGFTFS QYPMWWVRQA PGKGLEWVSS IYPSGGGTFY | 60 |
| ADSVKGRFTI SRDNSKNTLY LQMNSLRAED TAVYYCAKDR AYGDYVGWNG FDYWGQGTLV | 120 |
| TVSS | 124 |
| LC for Fab M269-D01 | |
| (SEQ ID NO: 954) | |
| QDIQMTQSPA TLSLSPGERA TLSCRASQSI SSFLAWYQQK PGQAPRLLIY DASYRATGIP | 60 |
| ARFSGSGSGT DFTLTISSLE PEDYAVYYCQ QRGNWPITFG QGTRLEIK | 108 |
| HC for Fab M269-D01 | |
| (SEQ ID NO: 955) | |
| EVQLLESGGG LVQPGGSLRL SCAASGFTFS QYPMWWVRQA PGKGLEWVSS IYSSGGATYY | 60 |
| ADSVKGRFTI SRDNSKNTLY LQMNSLRAED TAVYYCAKDR AYGDYVGWNG FDYWGQGTLV | 120 |
| TVSS | 124 |
| LC for Fab M270-C06 | |
| (SEQ ID NO: 956) | |
| QDIQMTQSPA TLSLSPGERA TLSCRASQSI SSFLAWYQQK PGQAPRLLIY DASYRATGIP | 60 |
| ARFSGSGSGT DFTLTISSLE PEDYAVYYCQ QRGNWPITFG QGTRLEIK | 108 |
| HC for Fab M270-C06 | |
| (SEQ ID NO: 957) | |
| EVQLLESGGG LVQPGGSLRL SCAASGFTFS QYPMWWVRQA PGKGLEWVSV IYPSGGFTSY | 60 |
| ADSVKGRFTI SRDNSKNTLY LQMNSLRAED TAVYYCAKDR AYGDYVGWNG FDYWGQGTLV | 120 |
| TVSS | 124 |
| LC for Fab M270-D09 | |
| (SEQ ID NO: 958) | |
| QDIQMTQSPA TLSLSPGERA TLSCRASQSI SSFLAWYQQK PGQAPRLLIY DASYRATGIP | 60 |
| ARFSGSGSGT DFTLTISSLE PEDYAVYYCQ QRGNWPITFG QGTRLEIK | 108 |
| HC for Fab M270-D09 | |
| (SEQ ID NO: 959) | |
| EVQLLESGGG LVQPGGSLRL SCAASGFTFS QYPMWWVRQA PGKGLEWVSV IYPSGGYTGY | 60 |
| ADSVKGRFTI SRDNSKNTLY LQMNSLRAED TAVYYCAKDR AYGDYVGWNG FDYWGQGTLV | 120 |
| TVSS | 124 |
| LC for Fab M275-F07 | |
| (SEQ ID NO: 960) | |
| QDIQMTQSPA TLSLSPGERA TLSCRASQSI SSFLAWYQQK PGQAPRLLIY DASYRATGIP | 60 |
| ARFSGSGSGT DFTLTISSLE PEDYAVYYCQ QRGNWPITFG QGTRLEIK | 108 |
| HC for Fab M275-F07 | |
| (SEQ ID NO: 961) | |
| EVQLLESGGG LVQPGGSLRL SCAASGFTFS QYQMWWVRQA PGKGLEWVSV IYPSGGATYY | 60 |
| ADSVKGRFTI SRDNSKNTLY LQMNSLRAED TAVYYCAKDR AYGDYVGWNG FDYWGQGTLV | 120 |
| TVSS | 124 |
| LC for Fab M277-D10 | |
| (SEQ ID NO: 962) | |
| QDIQMTQSPA TLSLSPGERA TLSCRASQSI SSFLAWYQQK PGQAPRLLIY DASYRATGIP | 60 |
| ARFSGSGSGT DFTLTISSLE PEDYAVYYCQ QRGNWPITFG QGTRLEIK | 108 |
| HC for Fab M277-D10 | |
| (SEQ ID NO: 963) | |
| EVQLLESGGG LVQPGGSLRL SCAASGFTFS QYSMIWVRQA PGKGLEWVSY IVPSGGYTSY | 60 |
| ADSVKGRFTI SRDNSKNTLY LQMNSLRAED TAVYYCAKDR AYGDYVGWNG FDYWGQGTLV | 120 |
| TVSS | 124 |
| LC for Fab M275-E02 | |
| (SEQ ID NO: 964) | |
| QDIQMTQSPA TLSLSPGERA TLSCRASQSI SSFLAWYQQK PGQAPRLLIY DASYRATGIP | 60 |
| ARFSGSGSGT DFTLTISSLE PEDYAVYYCQ QRGNWPITFG QGTRLEIK | 108 |
| HC for Fab M275-E02 | |
| (SEQ ID NO: 965) | |
| EVQLLESGGG LVQPGGSLRL SCAASGFTFS QYSMWWVRQA PGKGLEWVSS IVPSGGATFY | 60 |
| ADSVKGRFTI SRDNSKNTLY LQMNSLRAED TAVYYCAKDR AYGDYVGWNG FDYWGQGTLV | 120 |
| TVSS | 124 |
| LC for Fab M274-H10 | |
| (SEQ ID NO: 966) | |
| QDIQMTQSPA TLSLSPGERA TLSCRASQSI SSFLAWYQQK PGQAPRLLIY DASYRATGIP | 60 |
| ARFSGSGSGT DFTLTISSLE PEDYAVYYCQ QRGNWPITFG QGTRLEIK | 108 |
| HC for Fab M274-H10 | |
| (SEQ ID NO: 967) | |
| EVQLLESGGG LVQPGGSLRL SCAASGFTFS QYSMWWVRQA PGKGLEWVSV IYSSGGATFY | 60 |
| ADSVKGRFTI SRDNSKNTLY LQMNSLRAED TAVYYCAKDR AYGDYVGWNG FDYWGQGTLV | 120 |
| TVSS | 124 |
| LC for Fab M271-C06 | |
| (SEQ ID NO: 968) | |
| QDIQMTQSPA TLSLSPGERA TLSCRASQSI SSFLAWYQQK PGQAPRLLIY DASYRATGIP | 60 |
| ARFSGSGSGT DFTLTISSLE PEDYAVYYCQ QRGNWPITFG QGTRLEIK | 108 |
| HC for Fab M271-C06 | |
| (SEQ ID NO: 969) | |
| EVQLLESGGG LVQPGGSLRL SCAASGFTFS QYSMWWVRQA PGKGLEWVSV IYSSGSATFY | 60 |
| ADSVKGRFTI SRDNSKNTLY LQMNSLRAED TAVYYCAKDR AYGDYVGWNG FDYWGQGTLV | 120 |
| TVSS | 124 |
| LC for Fab M272-C06 | |
| (SEQ ID NO: 970) | |
| QDIQMTQSPA TLSLSPGERA TLSCRASQSI SSFLAWYQQK PGQAPRLLIY DASYRATGIP | 60 |
| ARFSGSGSGT DFTLTISSLE PEDYAVYYCQ QRGNWPITFG QGTRLEIK | 108 |
| HC for Fab M272-C06 | |
| (SEQ ID NO: 971) | |
| EVQLLESGGG LVQPGGSLRL SCAASGFTFS QYWMWWVRQA PGKGLEWVSV ISSSGGGTYY | 60 |
| ADSVKGRFTI SRDNSKNTLY LQMNSLRAED TAVYYCAKDR AYGDYVGWNG FDYWGQGTLV | 120 |
| TVSS | 124 |
| LC for Fab M274-C02 | |
| (SEQ ID NO: 972) | |
| QDIQMTQSPA TLSLSPGERA TLSCRASQSI SSFLAWYQQK PGQAPRLLIY DASYRATGIP | 60 |
| ARFSGSGSGT DFTLTISSLE PEDYAVYYCQ QRGNWPITFG QGTRLEIK | 108 |
| HC for Fab M274-C02 | |
| (SEQ ID NO: 973) | |
| EVQLLESGGG LVQPGGSLRL SCAASGFTFS QYWMWWVRQA PGKGLEWVSV IVPSGGKTFY | 60 |
| ADSVKGRFTI SRDNSKNTLY LQMNSLRAED TAVYYCAKDR AYGDYVGWNG FDYWGQGTLV | 120 |
| TVSS | 124 |
| LC for Fab M274-G01 | |
| (SEQ ID NO: 974) | |
| QDIQMTQSPA TLSLSPGERA TLSCRASQSI SSFLAWYQQK PGQAPRLLIY DASYRATGIP | 60 |
| ARFSGSGSGT DFTLTISSLE PEDYAVYYCQ QRGNWPITFG QGTRLEIK | 108 |
| HC for Fab M274-G01 | |
| (SEQ ID NO: 975) | |
| EVQLLESGGG LVQPGGSLRL SCAASGFTFS RYAMIWVRQA PGKGLEWVSY ISPSGGFTDY | 60 |
| ADSVKGRFTI SRDNSKNTLY LQMNSLRAED TAVYYCAKDR AYGDYVGWNG FDYWGQGTLV | 120 |
| TVSS | 124 |
| LC for Fab M268-F12 | |
| (SEQ ID NO: 976) | |
| QDIQMTQSPA TLSLSPGERA TLSCRASQSI SSFLAWYQQK PGQAPRLLIY DASYRATGIP | 60 |
| ARFSGSGSGT DFTLTISSLE PEDYAVYYCQ QRGNWPITFG QGTRLEIK | 108 |
| HC for Fab M268-F12 | |
| (SEQ ID NO: 977) | |
| EVQLLESGGG LVQPGGSLRL SCAASGFTFS RYAMMWVRQA PGKGLEWVSY ISPSGGFTDY | 60 |
| ADSVKGRFTI SRDNSKNTLY LQMNSLRAED TAVYYCAKDR AYGDYVGWNG FDYWGQGTLV | 120 |
| TVSS | 124 |
| LC for Fab M268-F11 | |
| (SEQ ID NO: 978) | |
| QDIQMTQSPA TLSLSPGERA TLSCRASQSI SSFLAWYQQK PGQAPRLLIY DASYRATGIP | 60 |
| ARFSGSGSGT DFTLTISSLE PEDYAVYYCQ QRGNWPITFG QGTRLEIK | 108 |
| HC for Fab M268-F11 | |
| (SEQ ID NO: 979) | |
| EVQLLESGGG LVQPGGSLRL SCAASGFTFS RYAMWWVRQA PGKGLEWVSS IYPSGGGTFY | 60 |
| ADSVKGRFTI SRDNSKNTLY LQMNSLRAED TAVYYCAKDR AYGDYVGWNG FDYWGQGTLV | 120 |
| TVSS | 124 |
| LC for Fab M299-E06 | |
| (SEQ ID NO: 980) | |
| QDIQMTQSPA TLSLSPGERA TLSCRASQSI SSFLAWYQQK PGQAPRLLIY DASYRATGIP | 60 |
| ARFSGSGSGT DFTLTISSLE PEDYAVYYCQ QRGNWPITFG QGTRLEIK | 108 |
| HC for Fab M299-E06 | |
| (SEQ ID NO: 981) | |
| EVQLLESGGG LVQPGGSLRL SCAASGFTFS RYAMWWVRQA PGKGLEWVSY IVPSGGYTDY | 60 |
| ADSVKGRFTI SRDNSKNTLY LQMNSLRAED TAVYYCAKDR AYGDYVGWNG FDYWGQGTLV | 120 |
| TVSS | 124 |
| LC for Fab M273-B12 | |
| (SEQ ID NO: 982) | |
| QDIQMTQSPA TLSLSPGERA TLSCRASQSI SSFLAWYQQK PGQAPRLLIY DASYRATGIP | 60 |
| ARFSGSGSGT DFTLTISSLE PEDYAVYYCQ QRGNWPITFG QGTRLEIK | 108 |
| HC for Fab M273-B12 | |
| (SEQ ID NO: 983) | |
| EVQLLESGGG LVQPGGSLRL SCAASGFTFS RYDMFWVRQA PGKGLEWVSS ISPSGGGTYY | 60 |
| ADSVKGRFTI SRDNSKNTLY LQMNSLRAED TAVYYCAKDR AYGDYVGWNG FDYWGQGTLV | 120 |
| TVSS | 124 |
| LC for Fab M298-A04 | |
| (SEQ ID NO: 984) | |
| QDIQMTQSPA TLSLSPGERA TLSCRASQSI SSFLAWYQQK PGQAPRLLIY DASYRATGIP | 60 |
| ARFSGSGSGT DFTLTISSLE PEDYAVYYCQ QRGNWPITFG QGTRLEIK | 108 |
| HC for Fab M298-A04 | |
| (SEQ ID NO: 985) | |
| EVQLLESGGG LVQPGGSLRL SCAASGFTFS RYDMWWVRQA PGKGLEWVSS ISSSGGFTGY | 60 |
| ADSVKGRFTI SRDNSKNTLY LQMNSLRAED TAVYYCAKDR AYGDYVGWNG FDYWGQGTLV | 120 |
| TVSS | 124 |
| LC for Fab M273-A11 | |
| (SEQ ID NO: 986) | |
| QDIQMTQSPA TLSLSPGERA TLSCRASQSI SSFLAWYQQK PGQAPRLLIY DASYRATGIP | 60 |
| ARFSGSGSGT DFTLTISSLE PEDYAVYYCQ QRGNWPITFG QGTRLEIK | 108 |
| HC for Fab M273-A11 | |
| (SEQ ID NO: 987) | |
| EVQLLESGGG LVQPGGSLRL SCAASGFTFS RYDMWWVRQA PGKGLEWVSV ISPSGGATFY | 60 |
| ADSVKGRFTI SRDNSKNTLY LQMNSLRAED TAVYYCAKDR AYGDYVGWNG FDYWGQGTLV | 120 |
| TVSS | 124 |
| LC for Fab M269-A05 | |
| (SEQ ID NO: 988) | |
| QDIQMTQSPA TLSLSPGERA TLSCRASQSI SSFLAWYQQK PGQAPRLLIY DASYRATGIP | 60 |
| ARFSGSGSGT DFTLTISSLE PEDYAVYYCQ QRGNWPITFG QGTRLEIK | 108 |
| HC for Fab M269-A05 | |
| (SEQ ID NO: 989) | |
| EVQLLESGGG LVQPGGSLRL SCAASGFTFS RYDMWWVRQA PGKGLEWVSV IYPSGGHTMY | 60 |
| ADSVKGRFTI SRDNSKNTLY LQMNSLRAED TAVYYCAKDR AYGDYVGWNG FDYWGQGTLV | 120 |
| TVSS | 124 |
| LC for Fab M270-C05 | |
| (SEQ ID NO: 990) | |
| QDIQMTQSPA TLSLSPGERA TLSCRASQSI SSFLAWYQQK PGQAPRLLIY DASYRATGIP | 60 |
| ARFSGSGSGT DFTLTISSLE PEDYAVYYCQ QRGNWPITFG QGTRLEIK | 108 |
| HC for Fab M270-C05 | |
| (SEQ ID NO: 991) | |
| EVQLLESGGG LVQPGGSLRL SCAASGFTFS RYDMWWVRQA PGKGLEWVSW ISPSGGGTQY | 60 |
| ADSVKGRFTI SRDNSKNTLY LQMNSLRAED TAVYYCAKDR AYGDYVGWNG FDYWGQGTLV | 120 |
| TVSS | 124 |
| LC for Fab M269-F05 | |
| (SEQ ID NO: 992) | |
| QDIQMTQSPA TLSLSPGERA TLSCRASQSI SSFLAWYQQK PGQAPRLLIY DASYRATGIP | 60 |
| ARFSGSGSGT DFTLTISSLE PEDYAVYYCQ QRGNWPITFG QGTRLEIK | 108 |
| HC for Fab M269-F05 | |
| (SEQ ID NO: 993) | |
| EVQLLESGGG LVQPGGSLRL SCAASGFTFS RYDMWWVRQA PGKGLEWVSY IVPSGGFTSY | 60 |
| ADSVKGRFTI SRDNSKNTLY LQMNSLRAED TAVYYCAKDR AYGDYVGWNG FDYWGQGTLV | 120 |
| TVSS | 124 |
| LC for Fab M277-H07 | |
| (SEQ ID NO: 994) | |
| QDIQMTQSPA TLSLSPGERA TLSCRASQSI SSFLAWYQQK PGQAPRLLIY DASYRATGIP | 60 |
| ARFSGSGSGT DFTLTISSLE PEDYAVYYCQ QRGNWPITFG QGTRLEIK | 108 |
| HC for Fab M277-H07 | |
| (SEQ ID NO: 995) | |
| EVQLLESGGG LVQPGGSLRL SCAASGFTFS RYHMWWVRQA PGKGLEWVSY ISPSGGSTLY | 60 |
| ADSVKGRFTI SRDNSKNTLY LQMNSLRAED TAVYYCAKDR AYGDYVGWNG FDYWGQGTLV | 120 |
| TVSS | 124 |
| LC for Fab M275-A06 | |
| (SEQ ID NO: 996) | |
| QDIQMTQSPA TLSLSPGERA TLSCRASQSI SSFLAWYQQK PGQAPRLLIY DASYRATGIP | 60 |
| ARFSGSGSGT DFTLTISSLE PEDYAVYYCQ QRGNWPITFG QGTRLEIK | 108 |
| HC for Fab M275-A06 | |
| (SEQ ID NO: 997) | |
| EVQLLESGGG LVQPGGSLRL SCAASGFTFS RYMMIWVRQA PGKGLEWVSG IYPSGGWTDY | 60 |
| ADSVKGRFTI SRDNSKNTLY LQMNSLRAED TAVYYCAKDR AYGDYVGWNG FDYWGQGTLV | 120 |
| TVSS | 124 |
| LC for Fab M268-B10 | |
| (SEQ ID NO: 998) | |
| QDIQMTQSPA TLSLSPGERA TLSCRASQSI SSFLAWYQQK PGQAPRLLIY DASYRATGIP | 60 |
| ARFSGSGSGT DFTLTISSLE PEDYAVYYCQ QRGNWPITFG QGTRLEIK | 108 |
| HC for Fab M268-B10 | |
| (SEQ ID NO: 999) | |
| EVQLLESGGG LVQPGGSLRL SCAASGFTFS RYNMWWVRQA PGKGLEWVSV IYPSGGATYY | 60 |
| ADSVKGRFTI SRDNSKNTLY LQMNSLRAED TAVYYCAKDR AYGDYVGWNG FDYWGQGTLV | 120 |
| TVSS | 124 |
| LC for Fab M270-H03 | |
| (SEQ ID NO: 1000) | |
| QDIQMTQSPA TLSLSPGERA TLSCRASQSI SSFLAWYQQK PGQAPRLLIY DASYRATGIP | 60 |
| ARFSGSGSGT DFTLTISSLE PEDYAVYYCQ QRGNWPITFG QGTRLEIK | 108 |
| HC for Fab M270-H03 | |
| (SEQ ID NO: 1001) | |
| EVQLLESGGG LVQPGGSLRL SCAASGFTFS RYPMFWVRQA PGKGLEWVSY ISPSGGYTSY | 60 |
| ADSVKGRFTI SRDNSKNTLY LQMNSLRAED TAVYYCAKDR AYGDYVGWNG FDYWGQGTLV | 120 |
| TVSS | 124 |
| LC for Fab M276-A02 | |
| (SEQ ID NO: 1002) | |
| QDIQMTQSPA TLSLSPGERA TLSCRASQSI SSFLAWYQQK PGQAPRLLIY DASYRATGIP | 60 |
| ARFSGSGSGT DFTLTISSLE PEDYAVYYCQ QRGNWPITFG QGTRLEIK | 108 |
| HC for Fab M276-A02 | |
| (SEQ ID NO: 1003) | |
| EVQLLESGGG LVQPGGSLRL SCAASGFTFS RYPMFWVRQA PGKGLEWVSY IVPSGGYTDY | 60 |
| ADSVKGRFTI SRDNSKNTLY LQMNSLRAED TAVYYCAKDR AYGDYVGWNG FDYWGQGTLV | 120 |
| TVSS | 124 |
| LC for Fab M304-C09 | |
| (SEQ ID NO: 1004) | |
| QDIQMTQSPA TLSLSPGERA TLSCRASQSI SSFLAWYQQK PGQAPRLLIY DASYRATGIP | 60 |
| ARFSGSGSGT DFTLTISSLE PEDYAVYYCQ QRGNWPITFG QGTRLEIK | 108 |
| HC for Fab M304-C09 | |
| (SEQ ID NO: 1005) | |
| EVQLLESGGG LVQPGGSLRL SCAASGFTFS RYPMIWVRQA PGKGLEWVSY IYPSGGGTYY | 60 |
| ADSVKGRFTI SRDNSKNTLY LQMNSLRAED TAVYYCAKDR AYGDYVGWNG FDYWGQGTLV | 120 |
| TVSS | 124 |
| LC for Fab M271-B05 | |
| (SEQ ID NO: 1006) | |
| QDIQMTQSPA TLSLSPGERA TLSCRASQSI SSFLAWYQQK PGQAPRLLIY DASYRATGIP | 60 |
| ARFSGSGSGT DFTLTISSLE PEDYAVYYCQ QRGNWPITFG QGTRLEIK | 108 |
| HC for Fab M271-B05 | |
| (SEQ ID NO: 1007) | |
| EVQLLESGGG LVQPGGSLRL SCAASGFTFS RYPMVWVRQA PGKGLEWVSY ISPSGGYTGY | 60 |
| ADSVKGRFTI SRDNSKNTLY LQMNSLRAED TAVYYCAKDR AYGDYVGWNG FDYWGQGTLV | 120 |
| TVSS | 124 |
| LC for Fab M270-C04 | |
| (SEQ ID NO: 1008) | |
| QDIQMTQSPA TLSLSPGERA TLSCRASQSI SSFLAWYQQK PGQAPRLLIY DASYRATGIP | 60 |
| ARFSGSGSGT DFTLTISSLE PEDYAVYYCQ QRGNWPITFG QGTRLEIK | 108 |
| HC for Fab M270-C04 | |
| (SEQ ID NO: 1009) | |
| EVQLLESGGG LVQPGGSLRL SCAASGFTFS RYPMWWVRQA PGKGLEWVSS ISSSGGGTYY | 60 |
| ADSVKGRFTI SRDNSKNTLY LQMNSLRAED TAVYYCAKDR AYGDYVGWNG FDYWGQGTLV | 120 |
| TVSS | 124 |
| LC for Fab M268-G08 | |
| (SEQ ID NO: 1010) | |
| QDIQMTQSPA TLSLSPGERA TLSCRASQSI SSFLAWYQQK PGQAPRLLIY DASYRATGIP | 60 |
| ARFSGSGSGT DFTLTISSLE PEDYAVYYCQ QRGNWPITFG QGTRLEIK | 108 |
| HC for Fab M268-G08 | |
| (SEQ ID NO: 1011) | |
| EVQLLESGGG LVQPGGSLRL SCAASGFTFS RYPMWWVRQA PGKGLEWVSS IYPSGGATFY | 60 |
| ADSVKGRFTI SRDNSKNTLY LQMNSLRAED TAVYYCAKDR AYGDYVGWNG FDYWGQGTLV | 120 |
| TVSS | 124 |
| LC for Fab M269-E08 | |
| (SEQ ID NO: 1012) | |
| QDIQMTQSPA TLSLSPGERA TLSCRASQSI SSFLAWYQQK PGQAPRLLIY DASYRATGIP | 60 |
| ARFSGSGSGT DFTLTISSLE PEDYAVYYCQ QRGNWPITFG QGTRLEIK | 108 |
| HC for Fab M269-E08 | |
| (SEQ ID NO: 1013) | |
| EVQLLESGGG LVQPGGSLRL SCAASGFTFS RYPMWWVRQA PGKGLEWVSV IYPSGGATYY | 60 |
| ADSVKGRFTI SRDNSKNTLY LQMNSLRAED TAVYYCAKDR AYGDYVGWNG FDYWGQGTLV | 120 |
| TVSS | 124 |
| LC for Fab M276-F02 | |
| (SEQ ID NO: 1014) | |
| QDIQMTQSPA TLSLSPGERA TLSCRASQSI SSFLAWYQQK PGQAPRLLIY DASYRATGIP | 60 |
| ARFSGSGSGT DFTLTISSLE PEDYAVYYCQ QRGNWPITFG QGTRLEIK | 108 |
| HC for Fab M276-F02 | |
| (SEQ ID NO: 1015) | |
| EVQLLESGGG LVQPGGSLRL SCAASGFTFS RYPMWWVRQA PGKGLEWVSV IYPSGGTTFY | 60 |
| ADSVKGRFTI SRDNSKNTLY LQMNSLRAED TAVYYCAKDR AYGDYVGWNG FDYWGQGTLV | 120 |
| TVSS | 124 |
| LC for Fab M276-A10 | |
| (SEQ ID NO: 1016) | |
| QDIQMTQSPA TLSLSPGERA TLSCRASQSI SSFLAWYQQK PGQAPRLLIY DASYRATGIP | 60 |
| ARFSGSGSGT DFTLTISSLE PEDYAVYYCQ QRGNWPITFG QGTRLEIK | 108 |
| HC for Fab M276-A10 | |
| (SEQ ID NO: 1017) | |
| EVQLLESGGG LVQPGGSLRL SCAASGFTFS RYPMWWVRQA PGKGLEWVSV IYSSGGYTGY | 60 |
| ADSVKGRFTI SRDNSKNTLY LQMNSLRAED TAVYYCAKDR AYGDYVGWNG FDYWGQGTLV | 120 |
| TVSS | 124 |
| LC for Fab M304-D03 | |
| (SEQ ID NO: 1018) | |
| QDIQMTQSPA TLSLSPGERA TLSCRASQSI SSFLAWYQQK PGQAPRLLIY DASYRATGIP | 60 |
| ARFSGSGSGT DFTLTISSLE PEDYAVYYCQ QRGNWPITFG QGTRLEIK | 108 |
| HC for Fab M304-D03 | |
| (SEQ ID NO: 1019) | |
| EVQLLESGGG LVQPGGSLRL SCAASGFTFS RYPMWWVRQA PGKGLEWVSY IGSSGGGTFY | 60 |
| ADSVKGRFTI SRDNSKNTLY LQMNSLRAED TAVYYCAKDR AYGDYVGWNG FDYWGQGTLV | 120 |
| TVSS | 124 |
| LC for Fab M271-D11 | |
| (SEQ ID NO: 1020) | |
| QDIQMTQSPA TLSLSPGERA TLSCRASQSI SSFLAWYQQK PGQAPRLLIY DASYRATGIP | 60 |
| ARFSGSGSGT DFTLTISSLE PEDYAVYYCQ QRGNWPITFG QGTRLEIK | 108 |
| HC for Fab M271-D11 | |
| (SEQ ID NO: 1021) | |
| EVQLLESGGG LVQPGGSLRL SCAASGFTFS RYPMWWVRQA PGKGLEWVSY ISPSGGGTLY | 60 |
| ADSVKGRFTI SRDNSKNTLY LQMNSLRAED TAVYYCAKDR AYGDYVGWNG FDYWGQGTLV | 120 |
| TVSS | 124 |
| LC for Fab M272-A08 | |
| (SEQ ID NO: 1022) | |
| QDIQMTQSPA TLSLSPGERA TLSCRASQSI SSFLAWYQQK PGQAPRLLIY DASYRATGIP | 60 |
| ARFSGSGSGT DFTLTISSLE PEDYAVYYCQ QRGNWPITFG QGTRLEIK | 108 |
| HC for Fab M272-A08 | |
| (SEQ ID NO: 1023) | |
| EVQLLESGGG LVQPGGSLRL SCAASGFTFS RYPMWWVRQA PGKGLEWVSY ISPSGGMTSY | 60 |
| ADSVKGRFTI SRDNSKNTLY LQMNSLRAED TAVYYCAKDR AYGDYVGWNG FDYWGQGTLV | 120 |
| TVSS | 124 |
| LC for Fab M269-B07 | |
| (SEQ ID NO: 1024) | |
| QDIQMTQSPA TLSLSPGERA TLSCRASQSI SSFLAWYQQK PGQAPRLLIY DASYRATGIP | 60 |
| ARFSGSGSGT DFTLTISSLE PEDYAVYYCQ QRGNWPITFG QGTRLEIK | 108 |
| HC for Fab M269-B07 | |
| (SEQ ID NO: 1025) | |
| EVQLLESGGG LVQPGGSLRL SCAASGFTFS RYPMWWVRQA PGKGLEWVSY ISSSGGGTFY | 60 |
| ADSVKGRFTI SRDNSKNTLY LQMNSLRAED TAVYYCAKDR AYGDYVGWNG FDYWGQGTLV | 120 |
| TVSS | 124 |
| LC for Fab M271-G08 | |
| (SEQ ID NO: 1026) | |
| QDIQMTQSPA TLSLSPGERA TLSCRASQSI SSFLAWYQQK PGQAPRLLIY DASYRATGIP | 60 |
| ARFSGSGSGT DFTLTISSLE PEDYAVYYCQ QRGNWPITFG QGTRLEIK | 108 |
| HC for Fab M271-G08 | |
| (SEQ ID NO: 1027) | |
| EVQLLESGGG LVQPGGSLRL SCAASGFTFS RYPMWWVRQA PGKGLEWVSY ISSSGGGTLY | 60 |
| ADSVKGRFTI SRDNSKNTLY LQMNSLRAED TAVYYCAKDR AYGDYVGWNG FDYWGQGTLV | 120 |
| TVSS | 124 |
| LC for Fab M271-A02 | |
| (SEQ ID NO: 1028) | |
| QDIQMTQSPA TLSLSPGERA TLSCRASQSI SSFLAWYQQK PGQAPRLLIY DASYRATGIP | 60 |
| ARFSGSGSGT DFTLTISSLE PEDYAVYYCQ QRGNWPITFG QGTRLEIK | 108 |
| HC for Fab M271-A02 | |
| (SEQ ID NO: 1029) | |
| EVQLLESGGG LVQPGGSLRL SCAASGFTFS RYPMWWVRQA PGKGLEWVSY IVPSGGATYY | 60 |
| ADSVKGRFTI SRDNSKNTLY LQMNSLRAED TAVYYCAKDR AYGDYVGWNG FDYWGQGTLV | 120 |
| TVSS | 124 |
| LC for Fab M273-G11 | |
| (SEQ ID NO: 1030) | |
| QDIQMTQSPA TLSLSPGERA TLSCRASQSI SSFLAWYQQK PGQAPRLLIY DASYRATGIP | 60 |
| ARFSGSGSGT DFTLTISSLE PEDYAVYYCQ QRGNWPITFG QGTRLEIK | 108 |
| HC for Fab M273-G11 | |
| (SEQ ID NO: 1031) | |
| EVQLLESGGG LVQPGGSLRL SCAASGFTFS RYPMWWVRQA PGKGLEWVSY IVPSGGFTDY | 60 |
| AHSVKGRFTI SRDNSKNTLY LQMNSLRAED TAVYYCAKDR AYGDYVGWNG FDYWGQGTLV | 120 |
| TVSS | 124 |
| LC for Fab M299-B04 | |
| (SEQ ID NO: 1032) | |
| QDIQMTQSPA TLSLSPGERA TLSCRASQSI SSFLAWYQQK PGQAPRLLIY DASYRATGIP | 60 |
| ARFSGSGSGT DFTLTISSLE PEDYAVYYCQ QRGNWPITFG QGTRLEIK | 108 |
| HC for Fab M299-B04 | |
| (SEQ ID NO: 1033) | |
| EVQLLESGGG LVQPGGSLRL SCAASGFTFS RYPMWWVRQA PGKGLEWVSY IVPSGGTTYY | 60 |
| ADSVKGRFTI SRDNSKNTLY LQMNSLRAED TAVYYCAKDR AYGDYVGWNG FDYWGQGTLV | 120 |
| TVSS | 124 |
| LC for Fab M275-E08 | |
| (SEQ ID NO: 1034) | |
| QDIQMTQSPA TLSLSPGERA TLSCRASQSI SSFLAWYQQK PGQAPRLLIY DASYRATGIP | 60 |
| ARFSGSGSGT DFTLTISSLE PEDYAVYYCQ QRGNWPITFG QGTRLEIK | 108 |
| HC for Fab M275-E08 | |
| (SEQ ID NO: 1035) | |
| EVQLLESGGG LVQPGGSLRL SCAASGFTFS RYPMWWVRQA PGKGLEWVSY IYPSGGATFY | 60 |
| ADSVKGRFTI SRDNSKNTLY LQMNSLRAED TAVYYCAKDR AYGDYVGWNG FDYWGQGTLV | 120 |
| TVSS | 124 |
| LC for Fab M275-B08 | |
| (SEQ ID NO: 1036) | |
| QDIQMTQSPA TLSLSPGERA TLSCRASQSI SSFLAWYQQK PGQAPRLLIY DASYRATGIP | 60 |
| ARFSGSGSGT DFTLTISSLE PEDYAVYYCQ QRGNWPITFG QGTRLEIK | 108 |
| HC for Fab M275-B08 | |
| (SEQ ID NO: 1037) | |
| EVQLLESGGG LVQPGGSLRL SCAASGFTFS RYPMWWVRQA PGKGLEWVSY IYSSGGKTFY | 60 |
| ADSVKGRFTI SRDNSKNTLY LQMNSLRAED TAVYYCAKDR AYGDYVGWNG FDYWGQGTLV | 120 |
| TVSS | 124 |
| LC for Fab M277-G09 | |
| (SEQ ID NO: 1038) | |
| QDIQMTQSPA TLSLSPGERA TLSCRASQSI SSFLAWYQQK PGQAPRLLIY DASYRATGIP | 60 |
| ARFSGSGSGT DFTLTISSLE PEDYAVYYCQ QRGNWPITFG QGTRLEIK | 108 |
| HC for Fab M277-G09 | |
| (SEQ ID NO: 1039) | |
| EVQLLESGGG LVQPGGSLRL SCAASGFTFS RYSMWWVRQA PGKGLEWVSS IYPSGGATFY | 60 |
| ADSVKGRFTI SRDNSKNTLY LQMNSLRAED TAVYYCAKDR AYGDYVGWNG FDYWGQGTLV | 120 |
| TVSS | 124 |
| LC for Fab M271-E01 | |
| (SEQ ID NO: 1040) | |
| QDIQMTQSPA TLSLSPGERA TLSCRASQSI SSFLAWYQQK PGQAPRLLIY DASYRATGIP | 60 |
| ARFSGSGSGT DFTLTISSLE PEDYAVYYCQ QRGNWPITFG QGTRLEIK | 108 |
| HC for Fab M271-E01 | |
| (SEQ ID NO: 1041) | |
| EVQLLESGGG LVQPGGSLRL SCAASGFTFS RYSMWWVRQA PGKGLEWVSV IYPSGGYTGY | 60 |
| ADSVKGRFTI SRDNSKNTLY LQMNSLRAED TAVYYCAKDR AYGDYVGWNG FDYWGQGTLV | 120 |
| TVSS | 124 |
| LC for Fab M275-F09 | |
| (SEQ ID NO: 1042) | |
| QDIQMTQSPA TLSLSPGERA TLSCRASQSI SSFLAWYQQK PGQAPRLLIY DASYRATGIP | 60 |
| ARFSGSGSGT DFTLTISSLE PEDYAVYYCQ QRGNWPITFG QGTRLEIK | 108 |
| HC for Fab M275-F09 | |
| (SEQ ID NO: 1043) | |
| EVQLLESGGG LVQPGGSLRL SCAASGFTFS RYWMWWVRQA PGKGLEWVSV IVPSGGATFY | 60 |
| ADSVKGRFTI SRDNSKNTLY LQMNSLRAED TAVYYCAKDR AYGDYVGWNG FDYWGQGTLV | 120 |
| TVSS | 124 |
| LC for Fab M269-D08 | |
| (SEQ ID NO: 1044) | |
| QDIQMTQSPA TLSLSPGERA TLSCRASQSI SSFLAWYQQK PGQAPRLLIY DASYRATGIP | 60 |
| ARFSGSGSGT DFTLTISSLE PEDYAVYYCQ QRGNWPITFG QGTRLEIK | 108 |
| HC for Fab M269-D08 | |
| (SEQ ID NO: 1045) | |
| EVQLLESGGG LVQPGGSLRL SCAASGFTFS RYYMMWVRQA PGKGLEWVSY ISPSGGATYY | 60 |
| ADSVKGRFTI SRDNSKNTLY LQMNSLRAED TAVYYCAKDR AYGDYVGWNG FDYWGQGTLV | 120 |
| TVSS | 124 |
| LC for Fab M277-C12 | |
| (SEQ ID NO: 1046) | |
| QDIQMTQSPA TLSLSPGERA TLSCRASQSI SSFLAWYQQK PGQAPRLLIY DASYRATGIP | 60 |
| ARFSGSGSGT DFTLTISSLE PEDYAVYYCQ QRGNWPITFG QGTRLEIK | 108 |
| HC for Fab M277-C12 | |
| (SEQ ID NO: 1047) | |
| EVQLLESGGG LVQPGGSLRL SCAASGFTFS SYDMIWVRQA PGKGLEWVSW IGPSGGSTMY | 60 |
| ADSVKGRFTI SRDNSKNTLY LQMNSLRAED TAVYYCAKDR AYGDYVGWNG FDYWGQGTLV | 120 |
| TVSS | 124 |
| LC for Fab M274-F12 | |
| (SEQ ID NO: 1048) | |
| QDIQMTQSPA TLSLSPGERA TLSCRASQSI SSFLAWYQQK PGQAPRLLIY DASYRATGIP | 60 |
| ARFSGSGSGT DFTLTISSLE PEDYAVYYCQ QRGNWPITFG QGTRLEIK | 108 |
| HC for Fab M274-F12 | |
| (SEQ ID NO: 1049) | |
| EVQLLESGGG LVQPGGSLRL SCAASGFTFS SYDMWWVRQA PGKGLEWVSS ISSSVGATYY | 60 |
| ADSVKGRFTI SRDNSKNTLY LQMNSLRAED TAVYYCAKDR AYGDYVGWNG FDYWGQGTLV | 120 |
| TVSS | 124 |
| LC for Fab M269-G01 | |
| (SEQ ID NO: 1050) | |
| QDIQMTQSPA TLSLSPGERA TLSCRASQSI SSFLAWYQQK PGQAPRLLIY DASYRATGIP | 60 |
| ARFSGSGSGT DFTLTISSLE PEDYAVYYCQ QRGNWPITFG QGTRLEIK | 108 |
| HC for Fab M269-G01 | |
| (SEQ ID NO: 1051) | |
| EVQLLESGGG LVQPGGSLRL SCAASGFTFS SYDMWWVRQA PGKGLEWVSV IGPSGGGTFY | 60 |
| ADSVKGRFTI SRDNSKNTLY LQMNSLRAED TAVYYCAKDR AYGDYVGWNG FDYWGQGTLV | 120 |
| TVSS | 124 |
| LC for Fab M269-F04 | |
| (SEQ ID NO: 1052) | |
| QDIQMTQSPA TLSLSPGERA TLSCRASQSI SSFLAWYQQK PGQAPRLLIY DASYRATGIP | 60 |
| ARFSGSGSGT DFTLTISSLE PEDYAVYYCQ QRGNWPITFG QGTRLEIK | 108 |
| HC for Fab M269-F04 | |
| (SEQ ID NO: 1053) | |
| EVQLLESGGG LVQPGGSLRL SCAASGFTFS SYDMWWVRQA PGKGLEWVSV ISPSGGYTGY | 60 |
| ADSVKGRFTI SRDNSKNTLY LQMNSLRAED TAVYYCAKDR AYGDYVGWNG FDYWGQGTLV | 120 |
| TVSS | 124 |
| LC for Fab M269-E01 | |
| (SEQ ID NO: 1054) | |
| QDIQMTQSPA TLSLSPGERA TLSCRASQSI SSFLAWYQQK PGQAPRLLIY DASYRATGIP | 60 |
| ARFSGSGSGT DFTLTISSLE PEDYAVYYCQ QRGNWPITFG QGTRLEIK | 108 |
| HC for Fab M269-E01 | |
| (SEQ ID NO: 1055) | |
| EVQLLESGGG LVQPGGSLRL SCAASGFTFS SYDMWWVRQA PGKGLEWVSV IYPSGGRTYY | 60 |
| ADSVKGRFTI SRDNSKNTLY LQMNSLRAED TAVYYCAKDR AYGDYVGWNG FDYWGQGTLV | 120 |
| TVSS | 124 |
| LC for Fab M269-G07 | |
| (SEQ ID NO: 1056) | |
| QDIQMTQSPA TLSLSPGERA TLSCRASQSI SSFLAWYQQK PGQAPRLLIY DASYRATGIP | 60 |
| ARFSGSGSGT DFTLTISSLE PEDYAVYYCQ QRGNWPITFG QGTRLEIK | 108 |
| HC for Fab M269-G07 | |
| (SEQ ID NO: 1057) | |
| EVQLLESGGG LVQPGGSLRL SCAASGFTFS SYDMWWVRQA PGKGLEWVSV IYSSGGFTGY | 60 |
| ADSVKGRFTI SRDNSKNTLY LQMNSLRAED TAVYYCAKDR AYGDYVGWNG FDYWGQGTLV | 120 |
| TVSS | 124 |
| LC for Fab M268-C01 | |
| (SEQ ID NO: 1058) | |
| QDIQMTQSPA TLSLSPGERA TLSCRASQSI SSFLAWYQQK PGQAPRLLIY DASYRATGIP | 60 |
| ARFSGSGSGT DFTLTISSLE PEDYAVYYCQ QRGNWPITFG QGTRLEIK | 108 |
| HC for Fab M268-C01 | |
| (SEQ ID NO: 1059) | |
| EVQLLESGGG LVQPGGSLRL SCAASGFTFS SYDMWWVRQA PGKGLEWVSV IYSSGGTTFY | 60 |
| ADSVKGRFTI SRDNSKNTLY LQMNSLRAED TAVYYCAKDR AYGDYVGWNG FDYWGQGTLV | 120 |
| TVSS | 124 |
| LC for Fab M268-D06 | |
| (SEQ ID NO: 1060) | |
| QDIQMTQSPA TLSLSPGERA TLSCRASQSI SSFLAWYQQK PGQAPRLLIY DASYRATGIP | 60 |
| ARFSGSGSGT DFTLTISSLE PEDYAVYYCQ QRGNWPITFG QGTRLEIK | 108 |
| HC for Fab M268-D06 | |
| (SEQ ID NO: 1061) | |
| EVQLLESGGG LVQPGGSLRL SCAASGFTFS SYDMWWVRQA PGKGLEWVSV IYSSGGYTGY | 60 |
| ADSVKGRFTI SRDNSKNTLY LQMNSLRAED TAVYYCAKDR AYGDYVGWNG FDYWGQGTLV | 120 |
| TVSS | 124 |
| LC for Fab M272-G07 | |
| (SEQ ID NO: 1062) | |
| QDIQMTQSPA TLSLSPGERA TLSCRASQSI SSFLAWYQQK PGQAPRLLIY DASYRATGIP | 60 |
| ARFSGSGSGT DFTLTISSLE PEDYAVYYCQ QRGNWPITFG QGTRLEIK | 108 |
| HC for Fab M272-G07 | |
| (SEQ ID NO: 1063) | |
| EVQLLESGGG LVQPGGSLRL SCAASGFTFS SYEMWWVRQA PGKGLEWVSV IYSSGGATFY | 60 |
| ADSVKGRFTI SRDNSKNTLY LQMNSLRAED TAVYYCAKDR AYGDYVGWNG FDYWGQGTLV | 120 |
| TVSS | 124 |
| LC for Fab M303-F07 | |
| (SEQ ID NO: 1064) | |
| QDIQMTQSPA TLSLSPGERA TLSCRASQSI SSFLAWYQQK PGQAPRLLIY DASYRATGIP | 60 |
| ARFSGSGSGT DFTLTISSLE PEDYAVYYCQ QRGNWPITFG QGTRLEIK | 108 |
| HC for Fab M303-F07 | |
| EVQLLESGGG LVQPGGSLRL SCAASGFTFS SYEMWWVRQA PGKGLEWVSY ISSSGGGTYY | 60 |
| ADSVKGRFTI SRDNSKNTLY LQMNSLRAED TAVYYCAKDR AYGDYVGWNG FDYWGQGTLV | 120 |
| TVSS | 124 |
| LC for Fab M275-B02 | |
| (SEQ ID NO: 1066) | |
| QDIQMTQSPA TLSLSPGERA TLSCRASQSI SSFLAWYQQK PGQAPRLLIY DASYRATGIP | 60 |
| ARFSGSGSGT DFTLTISSLE PEDYAVYYCQ QRGNWPITFG QGTRLEIK | 108 |
| HC for Fab M275-B02 | |
| (SEQ ID NO: 1067) | |
| EVQLLESGGG LVQPGGSLRL SCAASGFTFS SYMMIWVRQA PGKGLEWVSS ISPSGGGTYY | 60 |
| ADSVKGRFTI SRDNSKNTLY LQMNSLRAED TAVYYCAKDR AYGDYVGWNG FDYWGQGTLV | 120 |
| TVSS | 124 |
| LC for Fab M269-C01 | |
| (SEQ ID NO: 1068) | |
| QDIQMTQSPA TLSLSPGERA TLSCRASQSI SSFLAWYQQK PGQAPRLLIY DASYRATGIP | 60 |
| ARFSGSGSGT DFTLTISSLE PEDYAVYYCQ QRGNWPITFG QGTRLEIK | 108 |
| HC for Fab M269-C01 | |
| (SEQ ID NO: 1069) | |
| EVQLLESGGG LVQPGGSLRL SCAASGFTFS SYMMIWVRQA PGKGLEWVSS ISPSGGWTSY | 60 |
| ADSVKGRFTI SRDNSKNTLY LQMNSLRAED TAVYYCAKDR AYGDYVGWNG FDYWGQGTLV | 120 |
| TVSS | 124 |
| LC for Fab M268-H04 | |
| (SEQ ID NO: 1070) | |
| QDIQMTQSPA TLSLSPGERA TLSCRASQSI SSFLAWYQQK PGQAPRLLIY DASYRATGIP | 60 |
| ARFSGSGSGT DFTLTISSLE PEDYAVYYCQ QRGNWPITFG QGTRLEIK | 108 |
| HC for Fab M268-H04 | |
| (SEQ ID NO: 1071) | |
| EVQLLESGGG LVQPGGSLRL SCAASGFTFS SYMMIWVRQA PGKGLEWVSS IYPSGGYTSY | 60 |
| ADSVKGRFTI SRDNSKNTLY LQMNSLRAED TAVYYCAKDR AYGDYVGWNG FDYWGQGTLV | 120 |
| TVSS | 124 |
| LC for Fab M277-H08 | |
| (SEQ ID NO: 1072) | |
| QDIQMTQSPA TLSLSPGERA TLSCRASQSI SSFLAWYQQK PGQAPRLLIY DASYRATGIP | 60 |
| ARFSGSGSGT DFTLTISSLE PEDYAVYYCQ QRGNWPITFG QGTRLEIK | 108 |
| HC for Fab M277-H08 | |
| (SEQ ID NO: 1073) | |
| EVQLLESGGG LVQPGGSLRL SCAASGFTFS SYNMWWVRQA PGKGLEWVSS ISPSGGGTYY | 60 |
| ADSVKGRFTI SRDNSKNTLY LQMNSLRAED TAVYYCAKDR AYGDYVGWNG FDYWGQGTLV | 120 |
| TVSS | 124 |
| LC for Fab M274-B02 | |
| (SEQ ID NO: 1074) | |
| QDIQMTQSPA TLSLSPGERA TLSCRASQSI SSFLAWYQQK PGQAPRLLIY DASYRATGIP | 60 |
| ARFSGSGSGT DFTLTISSLE PEDYAVYYCQ QRGNWPITFG QGTRLEIK | 108 |
| HC for Fab M274-B02 | |
| (SEQ ID NO: 1075) | |
| EVQLLESGGG LVQPGGSLRL SCAASGFTFS SYPMIWVRQA PGKGLEWVSY ISSSGGFTDY | 60 |
| ADSVKGRFTI SRDNSKNTLY LQMNSLRAED TAVYYCAKDR AYGDYVGWNG FDYWGQGTLV | 120 |
| TVSS | 124 |
| LC for Fab M268-E03 | |
| (SEQ ID NO: 1076) | |
| QDIQMTQSPA TLSLSPGERA TLSCRASQSI SSFLAWYQQK PGQAPRLLIY DASYRATGIP | 60 |
| ARFSGSGSGT DFTLTISSLE PEDYAVYYCQ QRGNWPITFG QGTRLEIK | 108 |
| HC for Fab M268-E03 | |
| (SEQ ID NO: 1077) | |
| EVQLLESGGG LVQPGGSLRL SCAASGFTFS SYPMMWVRQA PGKGLEWVSY IYSSGGGTFY | 60 |
| ADSVKGRFTI SRDNSKNTLY LQMNSLRAED TAVYYCAKDR AYGDYVGWNG FDYWGQGTLV | 120 |
| TVSS | 124 |
| LC for Fab M302-G11 | |
| (SEQ ID NO: 1078) | |
| QDIQMTQSPA TLSLSPGERA TLSCRASQSI SSFLAWYQQK PGQAPRLLIY DASYRATGIP | 60 |
| ARFSGSGSGT DFTLTISSLE PEDYAVYYCQ QRGNWPITFG QGTRLEIK | 108 |
| HC for Fab M302-G11 | |
| (SEQ ID NO: 1079) | |
| EVQLLESGGG LVQPGGSLRL SCAASGFTFS SYPMWWVRQA PGKGLEWVSS ISPSGGGTYY | 60 |
| ADSVKGRFTI SRDNSKNTLY LQMNSLRAED TAVYYCAKDR AYGDYVGWNG FDYWGQGTLV | 120 |
| TVSS | 124 |
| LC for Fab M270-G08 | |
| (SEQ ID NO: 1080) | |
| QDIQMTQSPA TLSLSPGERA TLSCRASQSI SSFLAWYQQK PGQAPRLLIY DASYRATGIP | 60 |
| ARFSGSGSGT DFTLTISSLE PEDYAVYYCQ QRGNWPITFG QGTRLEIK | 108 |
| HC for Fab M270-G08 | |
| (SEQ ID NO: 1081) | |
| EVQLLESGGG LVQPGGSLRL SCAASGFTFS SYPMWWVRQA PGKGLEWVSS ISPSGMTYYA | 60 |
| DSVKGRFTIS RDNSKNTLYL QMNSLRAEDT AVYYCAKDRA YGDYVGWNGF DYWGQGTLVT | 120 |
| VSS | 123 |
| LC for Fab M268-E08 | |
| (SEQ ID NO: 1082) | |
| QDIQMTQSPA TLSLSPGERA TLSCRASQSI SSFLAWYQQK PGQAPRLLIY DASYRATGIP | 60 |
| ARFSGSGSGT DFTLTISSLE PEDYAVYYCQ QRGNWPITFG QGTRLEIK | 108 |
| HC for Fab M268-E08 | |
| (SEQ ID NO: 1083) | |
| EVQLLESGGG LVQPGGSLRL SCAASGFTFS SYPMWWVRQA PGKGLEWVSS IYPSGGGTFY | 60 |
| ADSVKGRFTI SRDNSKNTLY LQMNSLRAED TAVYYCAKDR AYGDYVGWNG FDYWGQGTLV | 120 |
| TVSS | 124 |
| LC for Fab M270-E05 | |
| (SEQ ID NO: 1084) | |
| QDIQMTQSPA TLSLSPGERA TLSCRASQSI SSFLAWYQQK PGQAPRLLIY DASYRATGIP | 60 |
| ARFSGSGSGT DFTLTISSLE PEDYAVYYCQ QRGNWPITFG QGTRLEIK | 108 |
| HC for Fab M270-E05 | |
| (SEQ ID NO: 1085) | |
| EVQLLESGGG LVQPGGSLRL SCAASGFTFS SYPMWWVRQA PGKGLEWVSY ISSSGGGTYY | 60 |
| ADSVKGRFTI SRDNSKNTLY LQMNSLRAED TAVYYCAKDR AYGDYVGWNG FDYWGQGTLV | 120 |
| TVSS | 124 |
| LC for Fab M271-A01 | |
| (SEQ ID NO: 1086) | |
| QDIQMTQSPA TLSLSPGERA TLSCRASQSI SSFLAWYQQK PGQAPRLLIY DASYRATGIP | 60 |
| ARFSGSGSGT DFTLTISSLE PEDYAVYYCQ QRGNWPITFG QGTRLEIK | 108 |
| HC for Fab M271-A01 | |
| (SEQ ID NO: 1087) | |
| EVQLLESGGG LVQPGGSLRL SCAASGFTFS SYPMWWVRQA PGKGLEWVSY IVPSGGATFY | 60 |
| ADSVKGRFTI SRDNSKNTLY LQMNSLRAED TAVYYCAKDR AYGDYVGWNG FDYWGQGTLV | 120 |
| TVSS | 124 |
| LC for Fab M270-C03 | |
| (SEQ ID NO: 1088) | |
| QDIQMTQSPA TLSLSPGERA TLSCRASQSI SSFLAWYQQK PGQAPRLLIY DASYRATGIP | 60 |
| ARFSGSGSGT DFTLTISSLE PEDYAVYYCQ QRGNWPITFG QGTRLEIK | 108 |
| HC for Fab M270-C03 | |
| (SEQ ID NO: 1089) | |
| EVQLLESGGG LVQPGGSLRL SCAASGFTFS SYPMWWVRQA PGKGLEWVSY IVPSGGSTLY | 60 |
| ADSVKGRFTI SRDNSKNTLY LQMNSLRAED TAVYYCAKDR AYGDYVGWNG FDYWGQGTLV | 120 |
| TVSS | 124 |
| LC for Fab M275-A09 | |
| (SEQ ID NO: 1090) | |
| QDIQMTQSPA TLSLSPGERA TLSCRASQSI SSFLAWYQQK PGQAPRLLIY DASYRATGIP | 60 |
| ARFSGSGSGT DFTLTISSLE PEDYAVYYCQ QRGNWPITFG QGTRLEIK | 108 |
| HC for Fab M275-A09 | |
| (SEQ ID NO: 1091) | |
| EVQLLESGGG LVQPGGSLRL SCAASGFTFS SYPMWWVRQA PGKGLEWVSY IVPSGGYTYY | 60 |
| ADSVKGRFTI SRDNSKNTLY LQMNSLRAED TAVYYCAKDR AYGDYVGWNG FDYWGQGTLV | 120 |
| TVSS | 124 |
| LC for Fab M298-D08 | |
| (SEQ ID NO: 1092) | |
| QDIQMTQSPA TLSLSPGERA TLSCRASQSI SSFLAWYQQK PGQAPRLLIY DASYRATGIP | 60 |
| ARFSGSGSGT DFTLTISSLE PEDYAVYYCQ QRGNWPITFG QGTRLEIK | 108 |
| HC for Fab M298-D08 | |
| (SEQ ID NO: 1093) | |
| EVQLLESGGG LVQPGGSLRL SCAASGFTFS SYQMWWVRQA PGKGLEWVSS IYPSGGATFY | 60 |
| ADSVKGRFTI SRDNSKNTLY LQMNSLRAED TAVYYCAKDR AYGDYVGWNG FDYWGQGTLV | 120 |
| TVSS | 124 |
| LC for Fab M274-A09 | |
| (SEQ ID NO: 1094) | |
| QDIQMTQSPA TLSLSPGERA TLSCRASQSI SSFLAWYQQK PGQAPRLLIY DASYRATGIP | 60 |
| ARFSGSGSGT DFTLTISSLE PEDYAVYYCQ QRGNWPITFG QGTRLEIK | 108 |
| HC for Fab M274-A09 | |
| (SEQ ID NO: 1095) | |
| EVQLLESGGG LVQPGGSLRL SCAASGFTFS SYSMWWVRQA PGKGLEWVSV IYSSGGYTGY | 60 |
| ADSVKGRFTI SRDNSKNTLY LQMNSLRAED TAVYYCAKDR AYGDYVGWNG FDYWGQGTLV | 120 |
| TVSS | 124 |
| LC for Fab M269-E06 | |
| (SEQ ID NO: 1096) | |
| QDIQMTQSPA TLSLSPGERA TLSCRASQSI SSFLAWYQQK PGQAPRLLIY DASYRATGIP | 60 |
| ARFSGSGSGT DFTLTISSLE PEDYAVYYCQ QRGNWPITFG QGTRLEIK | 108 |
| HC for Fab M269-E06 | |
| (SEQ ID NO: 1097) | |
| EVQLLESGGG LVQPGGSLRL SCAASGFTFS TYAMIWVRQA PGKGLEWVSY IGPSGGFTDY | 60 |
| ADSVKGRFTI SRDNSKNTLY LQMNSLRAED TAVYYCAKDR AYGDYVGWNG FDYWGQGTLV | 120 |
| TVSS | 124 |
| LC for Fab M269-H06 | |
| (SEQ ID NO: 1098) | |
| QDIQMTQSPA TLSLSPGERA TLSCRASQSI SSFLAWYQQK PGQAPRLLIY DASYRATGIP | 60 |
| ARFSGSGSGT DFTLTISSLE PEDYAVYYCQ QRGNWPITFG QGTRLEIK | 108 |
| HC for Fab M269-H06 | |
| (SEQ ID NO: 1099) | |
| EVQLLESGGG LVQPGGSLRL SCAASGFTFS TYAMWWVRQA PGKGLEWVSY ISPSGGGTFY | 60 |
| ADSVKGRFTI SRDNSKNTLY LQMNSLRAED TAVYYCAKDR AYGDYVGWNG FDYWGQGTLV | 120 |
| TVSS | 124 |
| LC for Fab M276-E11 | |
| (SEQ ID NO: 1100) | |
| QDIQMTQSPA TLSLSPGERA TLSCRASQSI SSFLAWYQQK PGQAPRLLIY DASYRATGIP | 60 |
| ARFSGSGSGT DFTLTISSLE PEDYAVYYCQ QRGNWPITFG QGTRLEIK | 108 |
| HC for Fab M276-E11 | |
| (SEQ ID NO: 1101) | |
| EVQLLESGGG LVQPGGSLRL SCAASGFTFS TYDMFWVRQA PGKGLEWVSS ISSSGGATFY | 60 |
| ADSVKGRFTI SRDNSKNTLY LQMNSLRAED TAVYYCAKDR AYGDYVGWNG FDYWGQGTLV | 120 |
| TVSS | 124 |
| LC for Fab M271-E11 | |
| (SEQ ID NO: 1102) | |
| QDIQMTQSPA TLSLSPGERA TLSCRASQSI SSFLAWYQQK PGQAPRLLIY DASYRATGIP | 60 |
| ARFSGSGSGT DFTLTISSLE PEDYAVYYCQ QRGNWPITFG QGTRLEIK | 108 |
| HC for Fab M271-E11 | |
| (SEQ ID NO: 1103) | |
| EVQLLESGGG LVQPGGSLRL SCAASGFTFS TYDMIWVRQA PGKGLEWVSY ISPSGGYTGY | 60 |
| ADSVKGRFTI SRDNSKNTLY LQMNSLRAED TAVYYCAKDR AYGDYVGWNG FDYWGQGTLV | 120 |
| TVSS | 124 |
| LC for Fab M270-A04 | |
| (SEQ ID NO: 1104) | |
| QDIQMTQSPA TLSLSPGERA TLSCRASQSI SSFLAWYQQK PGQAPRLLIY DASYRATGIP | 60 |
| ARFSGSGSGT DFTLTISSLE PEDYAVYYCQ QRGNWPITFG QGTRLEIK | 108 |
| HC for Fab M270-A04 | |
| (SEQ ID NO: 1105) | |
| EVQLLESGGG LVQPGGSLRL SCAASGFTFS TYDMIWVRQA PGKGLEWVSY ISSSGGFTDY | 60 |
| ADSVKGRFTI SRDNSKNTLY LQMNSLRAED TAVYYCAKDR AYGDYVGWNG FDYWGQGTLV | 120 |
| TVSS | 124 |
| LC for Fab M268-F10 | |
| (SEQ ID NO: 1106) | |
| QDIQMTQSPA TLSLSPGERA TLSCRASQSI SSFLAWYQQK PGQAPRLLIY DASYRATGIP | 60 |
| ARFSGSGSGT DFTLTISSLE PEDYAVYYCQ QRGNWPITFG QGTRLEIK | 108 |
| HC for Fab M268-F10 | |
| (SEQ ID NO: 1107) | |
| EVQLLESGGG LVQPGGSLRL SCAASGFTFS TYDMWWVRQA PGKGLEWVSV IYPSGGPTYY | 60 |
| ADSVKGRFTI SRDNSKNTLY LQMNSLRAED TAVYYCAKDR AYGDYVGWNG FDYWGQGTLV | 120 |
| TVSS | 124 |
| LC for Fab M275-A02 | |
| (SEQ ID NO: 1108) | |
| QDIQMTQSPA TLSLSPGERA TLSCRASQSI SSFLAWYQQK PGQAPRLLIY DASYRATGIP | 60 |
| ARFSGSGSGT DFTLTISSLE PEDYAVYYCQ QRGNWPITFG QGTRLEIK | 108 |
| HC for Fab M275-A02 | |
| (SEQ ID NO: 1109) | |
| EVQLLESGGG LVQPGGSLRL SCAASGFTFS TYDMWWVRQA PGKGLEWVSY ISSSGGGTFY | 60 |
| ADSVKGRFTI SRDNSKNTLY LQMNSLRAED TAVYYCAKDR AYGDYVGWNG FDYWGQGTLV | 120 |
| TVSS | 124 |
| LC for Fab M272-C08 | |
| (SEQ ID NO: 1110) | |
| QDIQMTQSPA TLSLSPGERA TLSCRASQSI SSFLAWYQQK PGQAPRLLIY DASYRATGIP | 60 |
| ARFSGSGSGT DFTLTISSLE PEDYAVYYCQ QRGNWPITFG QGTRLEIK | 108 |
| HC for Fab M272-C08 | |
| (SEQ ID NO: 1111) | |
| EVQLLESGGG LVQPGGSLRL SCAASGFTFS TYEMWWVRQA PGKGLEWVSY ISSSGGGTGY | 60 |
| ADSVKGRFTI SRDNSKNTLY LQMNSLRAED TAVYYCAKDR AYGDYVGWNG FDYWGQGTLV | 120 |
| TVSS | 124 |
| LC for Fab M277-F06 | |
| (SEQ ID NO: 1112) | |
| QDIQMTQSPA TLSLSPGERA TLSCRASQSI SSFLAWYQQK PGQAPRLLIY DASYRATGIP | 60 |
| ARFSGSGSGT DFTLTISSLE PEDYAVYYCQ QRGNWPITFG QGTRLEIK | 108 |
| HC for Fab M277-F06 | |
| (SEQ ID NO: 1113) | |
| EVQLLESGGG LVQPGGSLRL SCAASGFTFS TYPMFWVRQA PGKGLEWVSY ISPSGGYTDY | 60 |
| ADSVKGRFTI SRDNSKNTLY LQMNSLRAED TAVYYCAKDR AYGDYVGWNG FDYWGQGTLV | 120 |
| TVSS | 124 |
| LC for Fab M272-B07 | |
| (SEQ ID NO: 1114) | |
| QDIQMTQSPA TLSLSPGERA TLSCRASQSI SSFLAWYQQK PGQAPRLLIY DASYRATGIP | 60 |
| ARFSGSGSGT DFTLTISSLE PEDYAVYYCQ QRGNWPITFG QGTRLEIK | 108 |
| HC for Fab M272-B07 | |
| (SEQ ID NO: 1115) | |
| EVQLLESGGG LVQPGGSLRL SCAASGFTFS TYPMIWVRQA PGKGLEWVSY IVPSGGYTGY | 60 |
| ADSVKGRFTI SRDNSKNTLY LQMNSLRAED TAVYYCAKDR AYGDYVGWNG FDYWGQGTLV | 120 |
| TVSS | 124 |
| LC for Fab M276-E12 | |
| (SEQ ID NO: 1116) | |
| QDIQMTQSPA TLSLSPGERA TLSCRASQSI SSFLAWYQQK PGQAPRLLIY DASYRATGIP | 60 |
| ARFSGSGSGT DFTLTISSLE PEDYAVYYCQ QRGNWPITFG QGTRLEIK | 108 |
| HC for Fab M276-E12 | |
| (SEQ ID NO: 1117) | |
| EVQLLESGGG LVQPGGSLRL SCAASGFTFS TYPMMWVRQA PGKGLEWVSY IYPSGGATFY | 60 |
| ADSVKGRFTI SRDNSKNTLY LQMNSLRAED TAVYYCAKDR AYGDYVGWNG FDYWGQGTLV | 120 |
| TVSS | 124 |
| LC for Fab M299-D12 | |
| (SEQ ID NO: 1118) | |
| QDIQMTQSPA TLSLSPGERA TLSCRASQSI SSFLAWYQQK PGQAPRLLIY DASYRATGIP | 60 |
| ARFSGSGSGT DFTLTISSLE PEDYAVYYCQ QRGNWPITFG QGTRLEIK | 108 |
| HC for Fab M299-D12 | |
| (SEQ ID NO: 1119) | |
| EVQLLESGGG LVQPGGSLRL SCAASGFTFS TYPMWWVRQA PGKGLEWVSS ISPSGGATYY | 60 |
| ADSVKGRFTI SRDNSKNTLY LQMNSLRAED TAVYYCAKDR AYGDYVGWNG FDYWGQGTLV | 120 |
| TVSS | 124 |
| LC for Fab M273-F01 | |
| (SEQ ID NO: 1120) | |
| QDIQMTQSPA TLSLSPGERA TLSCRASQSI SSFLAWYQQK PGQAPRLLIY DASYRATGIP | 60 |
| ARFSGSGSGT DFTLTISSLE PEDYAVYYCQ QRGNWPITFG QGTRLEIK | 108 |
| HC for Fab M273-F01 | |
| (SEQ ID NO: 1121) | |
| EVQLLESGGG LVQPGGSLRL SCAASGFTFS TYPMWWVRQA PGKGLEWVSS IVPSGGATYY | 60 |
| ADSVKGRFTI SRDNSKNTLY LQMNSLRAED TAVYYCAKDR AYGDYVGWNG FDYWGQGTLV | 120 |
| TVSS | 124 |
| LC for Fab M271-C07 | |
| (SEQ ID NO: 1122) | |
| QDIQMTQSPA TLSLSPGERA TLSCRASQSI SSFLAWYQQK PGQAPRLLIY DASYRATGIP | 60 |
| ARFSGSGSGT DFTLTISSLE PEDYAVYYCQ QRGNWPITFG QGTRLEIK | 108 |
| HC for Fab M271-C07 | |
| (SEQ ID NO: 1123) | |
| EVQLLESGGG LVQPGGSLRL SCAASGFTFS TYPMWWVRQA PGKGLEWVSV IYSSGGYTGY | 60 |
| ADSVKGRFTI SRDNSKNTLY LQMNSLRAED TAVYYCAKDR AYGDYVGWNG FDYWGQGTLV | 120 |
| TVSS | 124 |
| LC for Fab M269-H10 | |
| (SEQ ID NO: 1124) | |
| QDIQMTQSPA TLSLSPGERA TLSCRASQSI SSFLAWYQQK PGQAPRLLIY DASYRATGIP | 60 |
| ARFSGSGSGT DFTLTISSLE PEDYAVYYCQ QRGNWPITFG QGTRLEIK | 108 |
| HC for Fab M269-H10 | |
| (SEQ ID NO: 1125) | |
| EVQLLESGGG LVQPGGSLRL SCAASGFTFS TYPMWWVRQA PGKGLEWVSY ISPSGGATFY | 60 |
| ADSVKGRFTI SRDNSKNTLY LQMNSLRAED TAVYYCAKDR AYGDYVGWNG FDYWGQGTLV | 120 |
| TVSS | 124 |
| LC for Fab M268-B07 | |
| (SEQ ID NO: 1126) | |
| QDIQMTQSPA TLSLSPGERA TLSCRASQSI SSFLAWYQQK PGQAPRLLIY DASYRATGIP | 60 |
| ARFSGSGSGT DFTLTISSLE PEDYAVYYCQ QRGNWPITFG QGTRLEIK | 108 |
| HC for Fab M268-B07 | |
| (SEQ ID NO: 1127) | |
| EVQLLESGGG LVQPGGSLRL SCAASGFTFS TYPMWWVRQA PGKGLEWVSY ISPSGGGTFY | 60 |
| ADSVKGRFTI SRDNSKNTLY LQMNSLRAED TAVYYCAKDR AYGDYVGWNG FDYWGQGTLV | 120 |
| TVSS | 124 |
| LC for Fab M277-G07 | |
| (SEQ ID NO: 1128) | |
| QDIQMTQSPA TLSLSPGERA TLSCRASQSI SSFLAWYQQK PGQAPRLLIY DASYRATGIP | 60 |
| ARFSGSGSGT DFTLTISSLE PEDYAVYYCQ QRGNWPITFG QGTRLEIK | 108 |
| HC for Fab M277-G07 | |
| (SEQ ID NO: 1129) | |
| EVQLLESGGG LVQPGGSLRL SCAASGFTFS TYPMWWVRQA PGKGLEWVSY IVPSGGYTDY | 60 |
| ADSVKGRFTI SRDNSKNTLY LQMNSLRAED TAVYYCAKDR AYGDYVGWNG FDYWGQGTLV | 120 |
| TVSS | 124 |
| LC for Fab M273-F06 | |
| (SEQ ID NO: 1130) | |
| QDIQMTQSPA TLSLSPGERA TLSCRASQSI SSFLAWYQQK PGQAPRLLIY DASYRATGIP | 60 |
| ARFSGSGSGT DFTLTISSLE PEDYAVYYCQ QRGNWPITFG QGTRLEIK | 108 |
| HC for Fab M273-F06 | |
| (SEQ ID NO: 1131) | |
| EVQLLESGGG LVQPGGSLRL SCAASGFTFS TYPMWWVRQA PGKGLEWVSY IYPSGGGTFY | 60 |
| ADSVKGRFTI SRDNSKNTLY LQMNSLRAED TAVYYCAKDR AYGDYVGWNG FDYWGQGTLV | 120 |
| TVSS | 124 |
| LC for Fab M274-E07 | |
| (SEQ ID NO: 1132) | |
| QDIQMTQSPA TLSLSPGERA TLSCRASQSI SSFLAWYQQK PGQAPRLLIY DASYRATGIP | 60 |
| ARFSGSGSGT DFTLTISSLE PEDYAVYYCQ QRGNWPITFG QGTRLEIK | 108 |
| HC for Fab M274-E07 | |
| (SEQ ID NO: 1133) | |
| EVQLLESGGG LVQPGGSLRL SCAASGFTFS TYQMWWVRQA PGKGLEWVSS IYSSGGTFYA | 60 |
| DSVKGRFTIS RDNSKNTLYL QMNSLRAEDT AVYYCAKDRA YGDYVGWNGF DYWGQGTLVT | 120 |
| VSS | 123 |
| LC for Fab M276-F04 | |
| (SEQ ID NO: 1134) | |
| QDIQMTQSPA TLSLSPGERA TLSCRASQSI SSFLAWYQQK PGQAPRLLIY DASYRATGIP | 60 |
| ARFSGSGSGT DFTLTISSLE PEDYAVYYCQ QRGNWPITFG QGTRLEIK | 108 |
| HC for Fab M276-F04 | |
| (SEQ ID NO: 1135) | |
| EVQLLESGGG LVQPGGSLRL SCAASGFTFS TYSMIWVRQA PGKGLEWVSY ISPSGGFTDY | 60 |
| ADSVKGRFTI SRDNSKNTLY LQMNSLRAED TAVYYCAKDR AYGDYVGWNG FDYWGQGTLV | 120 |
| TVSS | 124 |
| LC for Fab M270-A06 | |
| (SEQ ID NO: 1136) | |
| QDIQMTQSPA TLSLSPGERA TLSCRASQSI SSFLAWYQQK PGQAPRLLIY DASYRATGIP | 60 |
| ARFSGSGSGT DFTLTISSLE PEDYAVYYCQ QRGNWPITFG QGTRLEIK | 108 |
| HC for Fab M270-A06 | |
| (SEQ ID NO: 1137) | |
| EVQLLESGGG LVQPGGSLRL SCAASGFTFS VYDMIWVRQA PGKGLEWVSY IGPSGGMTLY | 60 |
| ADSVKGRFTI SRDNSKNTLY LQMNSLRAED TAVYYCAKDR AYGDYVGWNG FDYWGQGTLV | 120 |
| TVSS | 124 |
| LC for Fab M274-G08 | |
| (SEQ ID NO: 1138) | |
| QDIQMTQSPA TLSLSPGERA TLSCRASQSI SSFLAWYQQK PGQAPRLLIY DASYRATGIP | 60 |
| ARFSGSGSGT DFTLTISSLE PEDYAVYYCQ QRGNWPITFG QGTRLEIK | 108 |
| HC for Fab M274-G08 | |
| (SEQ ID NO: 1139) | |
| EVQLLESGGG LVQPGGSLRL SCAASGFTFS VYDMWWVRQA PGKGLEWVSV IYPSGGATYY | 60 |
| ADSVKGRFTI SRDNSKNTLY LQMNSLRAED TAVYYCAKDR AYGDYVGWNG FDYWGQGTLV | 120 |
| TVSS | 124 |
| LC for Fab M274-D12 | |
| (SEQ ID NO: 1140) | |
| QDIQMTQSPA TLSLSPGERA TLSCRASQSI SSFLAWYQQK PGQAPRLLIY DASYRATGIP | 60 |
| ARFSGSGSGT DFTLTISSLE PEDYAVYYCQ QRGNWPITFG QGTRLEIK | 108 |
| HC for Fab M274-D12 | |
| (SEQ ID NO: 1141) | |
| EVQLLESGGG LVQPGGSLRL SCAASGFTFS VYDMWWVRQA PGKGLEWVSV IYPSGGYTDY | 60 |
| ADSVKGRFTI SRDNSKNTLY LQMNSLRAED TAVYYCAKDR AYGDYVGWNG FDYWGQGTLV | 120 |
| TVSS | 124 |
| LC for Fab M304-E10 | |
| (SEQ ID NO: 1142) | |
| QDIQMTQSPA TLSLSPGERA TLSCRASQSI SSFLAWYQQK PGQAPRLLIY DASYRATGIP | 60 |
| ARFSGSGSGT DFTLTISSLE PEDYAVYYCQ QRGNWPITFG QGTRLEIK | 108 |
| HC for Fab M304-E10 | |
| (SEQ ID NO: 1143) | |
| EVQLLESGGG LVQPGGSLRL SCAASGFTFS VYDMWWVRQA PGKGLEWVSV IYSSGGATFY | 60 |
| ADSVKGRFTI SRDNSKNTLY LQMNSLRAED TAVYYCAKDR AYGDYVGWNG FDYWGQGTLV | 120 |
| TVSS | 124 |
| LC for Fab M268-A02 | |
| (SEQ ID NO: 1144) | |
| QDIQMTQSPA TLSLSPGERA TLSCRASQSI SSFLAWYQQK PGQAPRLLIY DASYRATGIP | 60 |
| ARFSGSGSGT DFTLTISSLE PEDYAVYYCQ QRGNWPITFG QGTRLEIK | 108 |
| HC for Fab M268-A02 | |
| (SEQ ID NO: 1145) | |
| EVQLLESGGG LVQPGGSLRL SCAASGFTFS VYDMWWVRQA PGKGLEWVSV IYSSGGPTFY | 60 |
| ADSVKGRFTI SRDNSKNTLY LQMNSLRAED TAVYYCAKDR AYGDYVGWNG FDYWGQGTLV | 120 |
| TVSS | 124 |
| LC for Fab M272-B06 | |
| (SEQ ID NO: 1146) | |
| QDIQMTQSPA TLSLSPGERA TLSCRASQSI SSFLAWYQQK PGQAPRLLIY DASYRATGIP | 60 |
| ARFSGSGSGT DFTLTISSLE PEDYAVYYCQ QRGNWPITFG QGTRLEIK | 108 |
| HC for Fab M272-B06 | |
| (SEQ ID NO: 1147) | |
| EVQLLESGGG LVQPGGSLRL SCAASGFTFS VYDMWWVRQA PGKGLEWVSY ISPSGGFTDY | 60 |
| ADSVKGRFTI SRDNSKNTLY LQMNSLRAED TAVYYCAKDR AYGDYVGWNG FDYWGQGTLV | 120 |
| TVSS | 124 |
| LC for Fab M268-D04 | |
| (SEQ ID NO: 1148) | |
| QDIQMTQSPA TLSLSPGERA TLSCRASQSI SSFLAWYQQK PGQAPRLLIY DASYRATGIP | 60 |
| ARFSGSGSGT DFTLTISSLE PEDYAVYYCQ QRGNWPITFG QGTRLEIK | 108 |
| HC for Fab M268-D04 | |
| (SEQ ID NO: 1149) | |
| EVQLLESGGG LVQPGGSLRL SCAASGFTFS VYEMWWVRQA PGKGLEWVSY ISPSGGGTFY | 60 |
| ADSVKGRFTI SRDNSKNTLY LQMNSLRAED TAVYYCAKDR AYGDYVGWNG FDYWGQGTLV | 120 |
| TVSS | 124 |
| LC for Fab M298-G07 | |
| (SEQ ID NO: 1150) | |
| QDIQMTQSPA TLSLSPGERA TLSCRASQSI SSFLAWYQQK PGQAPRLLIY DASYRATGIP | 60 |
| ARFSGSGSGT DFTLTISSLE PEDYAVYYCQ QRGNWPITFG QGTRLEIK | 108 |
| HC for Fab M298-G07 | |
| (SEQ ID NO: 1151) | |
| EVQLLESGGG LVQPGGSLRL SCAASGFTFS VYNMWWVRQA PGKGLEWVSS ISPSGGGTFY | 60 |
| ADSVKGRFTI SRDNSKNTLY LQMNSLRAED TAVYYCAKDR AYGDYVGWNG FDYWGQGTLV | 120 |
| TVSS | 124 |
| LC for Fab M276-E09 | |
| (SEQ ID NO: 1152) | |
| QDIQMTQSPA TLSLSPGERA TLSCRASQSI SSFLAWYQQK PGQAPRLLIY DASYRATGIP | 60 |
| ARFSGSGSGT DFTLTISSLE PEDYAVYYCQ QRGNWPITFG QGTRLEIK | 108 |
| HC for Fab M276-E09 | |
| (SEQ ID NO: 1153) | |
| EVQLLESGGG LVQPGGSLRL SCAASGFTFS VYPMWWVRQA PGKGLEWVSS ISPSGGATYY | 60 |
| ADSVKGRFTI SRDNSKNTLY LQMNSLRAED TAVYYCAKDR AYGDYVGWNG FDYWGQGTLV | 120 |
| TVSS | 124 |
| LC for Fab M269-B04 | |
| (SEQ ID NO: 1154) | |
| QDIQMTQSPA TLSLSPGERA TLSCRASQSI SSFLAWYQQK PGQAPRLLIY DASYRATGIP | 60 |
| ARFSGSGSGT DFTLTISSLE PEDYAVYYCQ QRGNWPITFG QGTRLEIK | 108 |
| HC for Fab M269-B04 | |
| (SEQ ID NO: 1155) | |
| EVQLLESGGG LVQPGGSLRL SCAASGFTFS VYPMWWVRQA PGKGLEWVSS ISPSGGYTGY | 60 |
| ADSVKGRFTI SRDNSKNTLY LQMNSLRAED TAVYYCAKDR AYGDYVGWNG FDYWGQGTLV | 120 |
| TVSS | 124 |
| LC for Fab M299-D07 | |
| (SEQ ID NO: 1156) | |
| QDIQMTQSPA TLSLSPGERA TLSCRASQSI SSFLAWYQQK PGQAPRLLIY DASYRATGIP | 60 |
| ARFSGSGSGT DFTLTISSLE PEDYAVYYCQ QRGNWPITFG QGTRLEIK | 108 |
| HC for Fab M299-D07 | |
| (SEQ ID NO: 1157) | |
| EVQLLESGGG LVQPGGSLRL SCAASGFTFS VYPMWWVRQA PGKGLEWVSS ISSGGATYYA | 60 |
| DSVKGRFTIS RDNSKNTLYL QMNSLRAEDT AVYYCAKDRA YGDYVGWNGF DYWGQGTLVT | 120 |
| VSS | 123 |
| LC for Fab M304-G02 | |
| (SEQ ID NO: 1158) | |
| QDIQMTQSPA TLSLSPGERA TLSCRASQSI SSFLAWYQQK PGQAPRLLIY DASYRATGIP | 60 |
| ARFSGSGSGT DFTLTISSLE PEDYAVYYCQ QRGNWPITFG QGTRLEIK | 108 |
| HC for Fab M304-G02 | |
| (SEQ ID NO: 1159) | |
| EVQLLESGGG LVQPGGSLRL SCAASGFTFS VYPMWWVRQA PGKGLEWVSW ISPSGGGTFY | 60 |
| ADSVKGRFTI SRDNSKNTLY LQMNSLRAED TAVYYCAKDR AYGDYVGWNG FDYWGQGTLV | 120 |
| TVSS | 124 |
| LC for Fab M268-D05 | |
| (SEQ ID NO: 1160) | |
| QDIQMTQSPA TLSLSPGERA TLSCRASQSI SSFLAWYQQK PGQAPRLLIY DASYRATGIP | 60 |
| ARFSGSGSGT DFTLTISSLE PEDYAVYYCQ QRGNWPITFG QGTRLEIK | 108 |
| HC for Fab M268-D05 | |
| (SEQ ID NO: 1161) | |
| EVQLLESGGG LVQPGGSLRL SCAASGFTFS VYPMWWVRQA PGKGLEWVSW ISSSGGGTAY | 60 |
| ADSVKGRFTI SRDNSKNTLY LQMNSLRAED TAVYYCAKDR AYGDYVGWNG FDYWGQGTLV | 120 |
| TVSS | 124 |
| LC for Fab M275-G10 | |
| (SEQ ID NO: 1162) | |
| QDIQMTQSPA TLSLSPGERA TLSCRASQSI SSFLAWYQQK PGQAPRLLIY DASYRATGIP | 60 |
| ARFSGSGSGT DFTLTISSLE PEDYAVYYCQ QRGNWPITFG QGTRLEIK | 108 |
| HC for Fab M275-G10 | |
| (SEQ ID NO: 1163) | |
| EVQLLESGGG LVQPGGSLRL SCAASGFTFS VYPMWWVRQA PGKGLEWVSY IVPSGGATYY | 60 |
| ADSVKGRFTI SRDNSKNTLY LQMNSLRAED TAVYYCAKDR AYGDYVGWNG FDYWGQGTLV | 120 |
| TVSS | 124 |
| LC for Fab M276-G02 | |
| (SEQ ID NO: 1164) | |
| QDIQMTQSPA TLSLSPGERA TLSCRASQSI SSFLAWYQQK PGQAPRLLIY DASYRATGIP | 60 |
| ARFSGSGSGT DFTLTISSLE PEDYAVYYCQ QRGNWPITFG QGTRLEIK | 108 |
| HC for Fab M276-G02 | |
| (SEQ ID NO: 1165) | |
| EVQLLESGGG LVQPGGSLRL SCAASGFTFS VYPMWWVRQA PGKGLEWVSY IYPSGGATYY | 60 |
| ADSVKGRFTI SRDNSKNTLY LQMNSLRAED TAVYYCAKDR AYGDYVGWNG FDYWGQGTLV | 120 |
| TVSS | 124 |
| LC for Fab M274-D10 | |
| (SEQ ID NO: 1166) | |
| QDIQMTQSPA TLSLSPGERA TLSCRASQSI SSFLAWYQQK PGQAPRLLIY DASYRATGIP | 60 |
| ARFSGSGSGT DFTLTISSLE PEDYAVYYCQ QRGNWPITFG QGTRLEIK | 108 |
| HC for Fab M274-D10 | |
| (SEQ ID NO: 1167) | |
| EVQLLESGGG LVQPGGSLRL SCAASGFTFS VYQMWWVRQA PGKGLEWVSV IYPSGGTTFY | 60 |
| ADSVKGRFTI SRDNSKNTLY LQMNSLRAED TAVYYCAKDR AYGDYVGWNG FDYWGQGTLV | 120 |
| TVSS | 124 |
| LC for Fab M274-E12 | |
| (SEQ ID NO: 1168) | |
| QDIQMTQSPA TLSLSPGERA TLSCRASQSI SSFLAWYQQK PGQAPRLLIY DASYRATGIP | 60 |
| ARFSGSGSGT DFTLTISSLE PEDYAVYYCQ QRGNWPITFG QGTRLEIK | 108 |
| HC for Fab M274-E12 | |
| (SEQ ID NO: 1169) | |
| EVQLLESGGG LVQPGGSLRL SCAASGFTFS VYWMIWVRQA PGKGLEWVSY ISPSGGGTFY | 60 |
| ADSVKGRFTI SRDNSKNTLY LQMNSLRAED TAVYYCAKDR AYGDYVGWNG FDYWGQGTLV | 120 |
| TVSS | 124 |
| LC for Fab M301-A06 | |
| (SEQ ID NO: 1170) | |
| QDIQMTQSPA TLSLSPGERA TLSCRASQSI SSFLAWYQQK PGQAPRLLIY DASYRATGIP | 60 |
| ARFSGSGSGT DFTLTISSLE PEDYAVYYCQ QRGNWPITFG QGTRLEIK | 108 |
| HC for Fab M301-A06 | |
| (SEQ ID NO: 1171) | |
| EVQLLESGGG LVQPGGSLRL SCAASGFTFS WYAMWWVRQA PGKGLEWVSS ISPSGGGTYY | 60 |
| ADSVKGRFTI SRDNSKNTLY LQMNSLRAED TAVYYCAKDR AYGDYVGWNG FDYWGQGTLV | 120 |
| TVSS | 124 |
| LC for Fab M268-F01 | |
| (SEQ ID NO: 1172) | |
| QDIQMTQSPA TLSLSPGERA TLSCRASQSI SSFLAWYQQK PGQAPRLLIY DASYRATGIP | 60 |
| ARFSGSGSGT DFTLTISSLE PEDYAVYYCQ QRGNWPITFG QGTRLEIK | 108 |
| HC for Fab M268-F01 | |
| (SEQ ID NO: 1173) | |
| EVQLLESGGG LVQPGGSLRL SCAASGFTFS WYDMFWVRQA PGKGLEWVSS ISPSGGATFY | 60 |
| ADSVKGRFTI SRDNSKNTLY LQMNSLRAED TAVYYCAKDR AYGDYVGWNG FDYWGQGTLV | 120 |
| TVSS | 124 |
| LC for Fab M268-D08 | |
| (SEQ ID NO: 1174) | |
| QDIQMTQSPA TLSLSPGERA TLSCRASQSI SSFLAWYQQK PGQAPRLLIY DASYRATGIP | 60 |
| ARFSGSGSGT DFTLTISSLE PEDYAVYYCQ QRGNWPITFG QGTRLEIK | 108 |
| HC for Fab M268-D08 | |
| (SEQ ID NO: 1175) | |
| EVQLLESGGG LVQPGGSLRL SCAASGFTFS WYDMWWVRQA PGKGLEWVSV IYPSGGATYY | 60 |
| ADSVKGRFTI SRDNSKNTLY LQMNSLRAED TAVYYCAKDR AYGDYVGWNG FDYWGQGTLV | 120 |
| TVSS | 124 |
| LC for Fab M268-B04 | |
| (SEQ ID NO: 1176) | |
| QDIQMTQSPA TLSLSPGERA TLSCRASQSI SSFLAWYQQK PGQAPRLLIY DASYRATGIP | 60 |
| ARFSGSGSGT DFTLTISSLE PEDYAVYYCQ QRGNWPITFG QGTRLEIK | 108 |
| HC for Fab M268-B04 | |
| (SEQ ID NO: 1177) | |
| EVQLLESGGG LVQPGGSLRL SCAASGFTFS WYDMWWVRQA PGKGLEWVSV IYPSGGFTDY | 60 |
| ADSVKGRFTI SRDNSKNTLY LQMNSLRAED TAVYYCAKDR AYGDYVGWNG FDYWGQGTLV | 120 |
| TVSS | 124 |
| LC for Fab M270-B04 | |
| (SEQ ID NO: 1178) | |
| QDIQMTQSPA TLSLSPGERA TLSCRASQSI SSFLAWYQQK PGQAPRLLIY DASYRATGIP | 60 |
| ARFSGSGSGT DFTLTISSLE PEDYAVYYCQ QRGNWPITFG QGTRLEIK | 108 |
| HC for Fab M270-B04 | |
| (SEQ ID NO: 1179) | |
| EVQLLESGGG LVQPGGSLRL SCAASGFTFS WYDMWWVRQA PGKGLEWVSV IYPSGGYTGY | 60 |
| ADSVKGRFTI SRDNSKNTLY LQMNSLRAED TAVYYCAKDR AYGDYVGWNG FDYWGQGTLV | 120 |
| TVSS | 124 |
| LC for Fab M268-D07 | |
| (SEQ ID NO: 1180) | |
| QDIQMTQSPA TLSLSPGERA TLSCRASQSI SSFLAWYQQK PGQAPRLLIY DASYRATGIP | 60 |
| ARFSGSGSGT DFTLTISSLE PEDYAVYYCQ QRGNWPITFG QGTRLEIK | 108 |
| HC for Fab M268-D07 | |
| (SEQ ID NO: 1181) | |
| EVQLLESGGG LVQPGGSLRL SCAASGFTFS WYDMWWVRQA PGKGLEWVSV IYSSGGATFY | 60 |
| ADSVKGRFTI SRDNSKNTLY LQMNSLRAED TAVYYCAKDR AYGDYVGWNG FDYWGQGTLV | 120 |
| TVSS | 124 |
| LC for Fab M276-F11 | |
| (SEQ ID NO: 1182) | |
| QDIQMTQSPA TLSLSPGERA TLSCRASQSI SSFLAWYQQK PGQAPRLLIY DASYRATGIP | 60 |
| ARFSGSGSGT DFTLTISSLE PEDYAVYYCQ QRGNWPITFG QGTRLEIK | 108 |
| HC for Fab M276-F11 | |
| (SEQ ID NO: 1183) | |
| EVQLLESGGG LVQPGGSLRL SCAASGFTFS WYDMWWVRQA PGKGLEWVSV IYSSGGPTFY | 60 |
| ADSVKGRFTI SRDNSKNTLY LQMNSLRAED TAVYYCAKDR AYGDYVGWNG FDYWGQGTLV | 120 |
| TVSS | 124 |
| LC for Fab M274-D03 | |
| (SEQ ID NO: 1184) | |
| QDIQMTQSPA TLSLSPGERA TLSCRASQSI SSFLAWYQQK PGQAPRLLIY DASYRATGIP | 60 |
| ARFSGSGSGT DFTLTISSLE PEDYAVYYCQ QRGNWPITFG QGTRLEIK | 108 |
| HC for Fab M274-D03 | |
| (SEQ ID NO: 1185) | |
| EVQLLESGGG LVQPGGSLRL SCAASGFTFS WYEMWWVRQA PGKGLEWVSW ISPSGGGTQY | 60 |
| ADSVKGRFTI SRDNSKNTLY LQMNSLRAED TAVYYCAKDR AYGDYVGWNG FDYWGQGTLV | 120 |
| TVSS | 124 |
| LC for Fab M274-H06 | |
| (SEQ ID NO: 1186) | |
| QDIQMTQSPA TLSLSPGERA TLSCRASQSI SSFLAWYQQK PGQAPRLLIY DASYRATGIP | 60 |
| ARFSGSGSGT DFTLTISSLE PEDYAVYYCQ QRGNWPITFG QGTRLEIK | 108 |
| HC for Fab M274-H06 | |
| (SEQ ID NO: 1187) | |
| EVQLLESGGG LVQPGGSLRL SCAASGFTFS WYEMWWVRQA PGKGLEWVSY ISPSGGGTYY | 60 |
| ADSVKGRFTI SRDNSKNTLY LQMNSLRAED TAVYYCAKDR AYGDYVGWNG FDYWGQGTLV | 120 |
| TVSS | 124 |
| LC for Fab M270-D07 | |
| (SEQ ID NO: 1188) | |
| QDIQMTQSPA TLSLSPGERA TLSCRASQSI SSFLAWYQQK PGQAPRLLIY DASYRATGIP | 60 |
| ARFSGSGSGT DFTLTISSLE PEDYAVYYCQ QRGNWPITFG QGTRLEIK | 108 |
| HC for Fab M270-D07 | |
| (SEQ ID NO: 1189) | |
| EVQLLESGGG LVQPGGSLRL SCAASGFTFS WYNMWWVRQA PGKGLEWVSV IYPSGGGTFY | 60 |
| ADSVKGRFTI SRDNSKNTLY LQMNSLRAED TAVYYCAKDR AYGDYVGWNG FDYWGQGTLV | 120 |
| TVSS | 124 |
| LC for Fab M274-F11 | |
| (SEQ ID NO: 1190) | |
| QDIQMTQSPA TLSLSPGERA TLSCRASQSI SSFLAWYQQK PGQAPRLLIY DASYRATGIP | 60 |
| ARFSGSGSGT DFTLTISSLE PEDYAVYYCQ QRGNWPITFG QGTRLEIK | 108 |
| HC for Fab M274-F11 | |
| (SEQ ID NO: 1191) | |
| EVQLLESGGG LVQPGGSLRL SCAASGFTFS WYNMWWVRQA PGKGLEWVSY IVSSGGFTDY | 60 |
| ADSVKGRFTI SRDNSKNTLY LQMNSLRAED TAVYYCAKDR AYGDYVGWNG FDYWGQGTLV | 120 |
| TVSS | 124 |
| LC for Fab M275-B07 | |
| (SEQ ID NO: 1192) | |
| QDIQMTQSPA TLSLSPGERA TLSCRASQSI SSFLAWYQQK PGQAPRLLIY DASYRATGIP | 60 |
| ARFSGSGSGT DFTLTISSLE PEDYAVYYCQ QRGNWPITFG QGTRLEIK | 108 |
| HC for Fab M275-B07 | |
| (SEQ ID NO: 1193) | |
| EVQLLESGGG LVQPGGSLRL SCAASGFTFS WYPMIWVRQA PGKGLEWVSY ISSSGGYTSY | 60 |
| ADSVKGRFTI SRDNSKNTLY LQMNSLRAED TAVYYCAKDR AYGDYVGWNG FDYWGQGTLV | 120 |
| TVSS | 124 |
| LC for Fab M274-C07 | |
| (SEQ ID NO: 1194) | |
| QDIQMTQSPA TLSLSPGERA TLSCRASQSI SSFLAWYQQK PGQAPRLLIY DASYRATGIP | 60 |
| ARFSGSGSGT DFTLTISSLE PEDYAVYYCQ QRGNWPITFG QGTRLEIK | 108 |
| HC for Fab M274-C07 | |
| (SEQ ID NO: 1195) | |
| EVQLLESGGG LVQPGGSLRL SCAASGFTFS WYPMTWVRQA PGKGLEWVSY ISPSGGYTGY | 60 |
| ADSVKGRFTI SRDNSKNTLY LQMNSLRAED TAVYYCAKDR AYGDYVGWNG FDYWGQGTLV | 120 |
| TVSS | 124 |
| LC for Fab M275-H02 | |
| (SEQ ID NO: 1196) | |
| QDIQMTQSPA TLSLSPGERA TLSCRASQSI SSFLAWYQQK PGQAPRLLIY DASYRATGIP | 60 |
| ARFSGSGSGT DFTLTISSLE PEDYAVYYCQ QRGNWPITFG QGTRLEIK | 108 |
| HC for Fab M275-H02 | |
| (SEQ ID NO: 1197) | |
| EVQLLESGGG LVQPGGSLRL SCAASGFTFS WYPMVWVRQA PGKGLEWVSY IYPSGGGTFY | 60 |
| ADSVKGRFTI SRDNSKNTLY LQMNSLRAED TAVYYCAKDR AYGDYVGWNG FDYWGQGTLV | 120 |
| TVSS | 124 |
| LC for Fab M276-B06 | |
| (SEQ ID NO: 1198) | |
| QDIQMTQSPA TLSLSPGERA TLSCRASQSI SSFLAWYQQK PGQAPRLLIY DASYRATGIP | 60 |
| ARFSGSGSGT DFTLTISSLE PEDYAVYYCQ QRGNWPITFG QGTRLEIK | 108 |
| HC for Fab M276-B06 | |
| (SEQ ID NO: 1199) | |
| EVQLLESGGG LVQPGGSLRL SCAASGFTFS WYPMWWVRQA PGKGLEWVSS ISPSGGATYY | 60 |
| ADSVKGRFTI SRDNSKNTLY LQMNSLRAED TAVYYCAKDR AYGDYVGWNG FDYWGQGTLV | 120 |
| TVSS | 124 |
| LC for Fab M305-H03 | |
| (SEQ ID NO: 1200) | |
| QDIQMTQSPA TLSLSPGERA TLSCRASQSI SSFLAWYQQK PGQAPRLLIY DASYRATGIP | 60 |
| ARFSGSGSGT DFTLTISSLE PEDYAVYYCQ QRGNWPITFG QGTRLEIK | 108 |
| HC for Fab M305-H03 | |
| (SEQ ID NO: 1201) | |
| EVQLLESGGG LVQPGGSLRL SCAASGFTFS WYPMWWVRQA PGKGLEWVSS IVPSGGATYY | 60 |
| ADSVKGRFTI SRDNSKNTLY LQMNSLRAED TAVYYCAKDR AYGDYVGWNG FDYWGQGTLV | 120 |
| TVSS | 124 |
| LC for Fab M272-G03 | |
| (SEQ ID NO: 1202) | |
| QDIQMTQSPA TLSLSPGERA TLSCRASQSI SSFLAWYQQK PGQAPRLLIY DASYRATGIP | 60 |
| ARFSGSGSGT DFTLTISSLE PEDYAVYYCQ QRGNWPITFG QGTRLEIK | 108 |
| HC for Fab M272-G03 | |
| (SEQ ID NO: 1203) | |
| EVQLLESGGG LVQPGGSLRL SCAASGFTFS WYPMWWVRQA PGKGLEWVSV IYPSGGYTSY | 60 |
| ADSVKGRFTI SRDNSKNTLY LQMNSLRAED TAVYYCAKDR AYGDYVGWNG FDYWGQGTLV | 120 |
| TVSS | 124 |
| LC for Fab M268-G05 | |
| (SEQ ID NO: 1204) | |
| QDIQMTQSPA TLSLSPGERA TLSCRASQSI SSFLAWYQQK PGQAPRLLIY DASYRATGIP | 60 |
| ARFSGSGSGT DFTLTISSLE PEDYAVYYCQ QRGNWPITFG QGTRLEIK | 108 |
| HC for Fab M268-G05 | |
| (SEQ ID NO: 1205) | |
| EVQLLESGGG LVQPGGSLRL SCAASGFTFS WYPMWWVRQA PGKGLEWVSV IYSSGGATFY | 60 |
| ADSVKGRFTI SRDNSKNTLY LQMNSLRAED TAVYYCAKDR AYGDYVGWNG FDYWGQGTLV | 120 |
| TVSS | 124 |
| LC for Fab M303-H08 | |
| (SEQ ID NO: 1206) | |
| QDIQMTQSPA TLSLSPGERA TLSCRASQSI SSFLAWYQQK PGQAPRLLIY DASYRATGIP | 60 |
| ARFSGSGSGT DFTLTISSLE PEDYAVYYCQ QRGNWPITFG QGTRLEIK | 108 |
| HC for Fab M303-H08 | |
| (SEQ ID NO: 1207) | |
| EVQLLESGGG LVQPGGSLRL SCAASGFTFS WYPMWWVRQA PGKGLEWVSV IYSSGGYTGY | 60 |
| ADSVKGRFTI SRDNSKNTLY LQMNSLRAED TAVYYCAKDR AYGDYVGWNG FDYWGQGTLV | 120 |
| TVSS | 124 |
| LC for Fab M271-C10 | |
| (SEQ ID NO: 1208) | |
| QDIQMTQSPA TLSLSPGERA TLSCRASQSI SSFLAWYQQK PGQAPRLLIY DASYRATGIP | 60 |
| ARFSGSGSGT DFTLTISSLE PEDYAVYYCQ QRGNWPITFG QGTRLEIK | 108 |
| HC for Fab M271-C10 | |
| (SEQ ID NO: 1209) | |
| EVQLLESGGG LVQPGGSLRL SCAASGFTFS WYPMWWVRQA PGKGLEWVSY IVPSGGATFY | 60 |
| ADSVKGRFTI SRDNSKNTLY LQMNSLRAED TAVYYCAKDR AYGDYVGWNG FDYWGQGTLV | 120 |
| TVSS | 124 |
| LC for Fab M274-B03 | |
| (SEQ ID NO: 1210) | |
| QDIQMTQSPA TLSLSPGERA TLSCRASQSI SSFLAWYQQK PGQAPRLLIY DASYRATGIP | 60 |
| ARFSGSGSGT DFTLTISSLE PEDYAVYYCQ QRGNWPITFG QGTRLEIK | 108 |
| HC for Fab M274-B03 | |
| (SEQ ID NO: 1211) | |
| EVQLLESGGG LVQPGGSLRL SCAASGFTFS WYPMWWVRQA PGKGLEWVSY IVPSGGRTYY | 60 |
| ADSVKGRFTI SRDNSKNTLY LQMNSLRAED TAVYYCAKDR AYGDYVGWNG FDYWGQGTLV | 120 |
| TVSS | 124 |
| LC for Fab M277-B08 | |
| (SEQ ID NO: 1212) | |
| QDIQMTQSPA TLSLSPGERA TLSCRASQSI SSFLAWYQQK PGQAPRLLIY DASYRATGIP | 60 |
| ARFSGSGSGT DFTLTISSLE PEDYAVYYCQ QRGNWPITFG QGTRLEIK | 108 |
| HC for Fab M277-B08 | |
| (SEQ ID NO: 1213) | |
| EVQLLESGGG LVQPGGSLRL SCAASGFTFS WYSMWWVRQA PGKGLEWVSV IYPSGGGTFY | 60 |
| ADSVKGRFTI SRDNSKNTLY LQMNSLRAED TAVYYCAKDR AYGDYVGWNG FDYWGQGTLV | 120 |
| TVSS | 124 |
| LC for Fab M273-D09 | |
| (SEQ ID NO: 1214) | |
| QDIQMTQSPA TLSLSPGERA TLSCRASQSI SSFLAWYQQK PGQAPRLLIY DASYRATGIP | 60 |
| ARFSGSGSGT DFTLTISSLE PEDYAVYYCQ QRGNWPITFG QGTRLEIK | 108 |
| HC for Fab M273-D09 | |
| (SEQ ID NO: 1215) | |
| EVQLLESGGG LVQPGGSLRL SCAASGFTFS WYTMWWVRQA PGKGLEWVSS ISPSGGGTYY | 60 |
| ADSVKGRFTI SRDNSKNTLY LQMNSLRAED TAVYYCAKDR AYGDYVGWNG FDYWGQGTLV | 120 |
| TVSS | 124 |
| LC for Fab M273-C04 | |
| (SEQ ID NO: 1216) | |
| QDIQMTQSPA TLSLSPGERA TLSCRASQSI SSFLAWYQQK PGQAPRLLIY DASYRATGIP | 60 |
| ARFSGSGSGT DFTLTISSLE PEDYAVYYCQ QRGNWPITFG QGTRLEIK | 108 |
| HC for Fab M273-C04 | |
| (SEQ ID NO: 1217) | |
| EVQLLESGGG LVQPGGSLRL SCAASGFTFS WYYMIWVRQA PGKGLEWVSY ISPSGGGTYY | 60 |
| ADSVKGRFTI SRDNSKNTLY LQMNSLRAED TAVYYCAKDR AYGDYVGWNG FDYWGQGTLV | 120 |
| TVSS | 124 |
| LC for Fab M275-H04 | |
| (SEQ ID NO: 1218) | |
| QDIQMTQSPA TLSLSPGERA TLSCRASQSI SSFLAWYQQK PGQAPRLLIY DASYRATGIP | 60 |
| ARFSGSGSGT DFTLTISSLE PEDYAVYYCQ QRGNWPITFG QGTRLEIK | 108 |
| HC for Fab M275-H04 | |
| (SEQ ID NO: 1219) | |
| EVQLLESGGG LVQPGGSLRL SCAASGFTFS YYDMIWVRQA PGKGLEWVSW ISPSGGLTMY | 60 |
| ADSVKGRFTI SRDNSKNTLY LQMNSLRAED TAVYYCAKDR AYGDYVGWNG FDYWGQGTLV | 120 |
| TVSS | 124 |
| LC for Fab M271-G11 | |
| (SEQ ID NO: 1220) | |
| QDIQMTQSPA TLSLSPGERA TLSCRASQSI SSFLAWYQQK PGQAPRLLIY DASYRATGIP | 60 |
| ARFSGSGSGT DFTLTISSLE PEDYAVYYCQ QRGNWPITFG QGTRLEIK | 108 |
| HC for Fab M271-G11 | |
| (SEQ ID NO: 1221) | |
| EVQLLESGGG LVQPGGSLRL SCAASGFTFS YYDMIWVRQA PGKGLEWVSY IVPSGGYTSY | 60 |
| ADSVKGRFTI SRDNSKNTLY LQMNSLRAED TAVYYCAKDR AYGDYVGWNG FDYWGQGTLV | 120 |
| TVSS | 124 |
| LC for Fab M271-F08 | |
| (SEQ ID NO: 1222) | |
| QDIQMTQSPA TLSLSPGERA TLSCRASQSI SSFLAWYQQK PGQAPRLLIY DASYRATGIP | 60 |
| ARFSGSGSGT DFTLTISSLE PEDYAVYYCQ QRGNWPITFG QGTRLEIK | 108 |
| HC for Fab M271-F08 | |
| (SEQ ID NO: 1223) | |
| EVQLLESGGG LVQPGGSLRL SCAASGFTFS YYDMVWVRQA PGKGLEWVSY ISPSGGFTLY | 60 |
| ADSVKGRFTI SRDNSKNTLY LQMNSLRAED TAVYYCAKDR AYGDYVGWNG FDYWGQGTLV | 120 |
| TVSS | 124 |
| LC for Fab M268-D01 | |
| (SEQ ID NO: 1224) | |
| QDIQMTQSPA TLSLSPGERA TLSCRASQSI SSFLAWYQQK PGQAPRLLIY DASYRATGIP | 60 |
| ARFSGSGSGT DFTLTISSLE PEDYAVYYCQ QRGNWPITFG QGTRLEIK | 108 |
| HC for Fab M268-D01 | |
| (SEQ ID NO: 1225) | |
| EVQLLESGGG LVQPGGSLRL SCAASGFTFS YYDMWWVRQA PGKGLEWVSS ISPSGGFTGY | 60 |
| ADSVKGRFTI SRDNSKNTLY LQMNSLRAED TAVYYCAKDR AYGDYVGWNG FDYWGQGTLV | 120 |
| TVSS | 124 |
| LC for Fab M304-E11 | |
| (SEQ ID NO: 1226) | |
| QDIQMTQSPA TLSLSPGERA TLSCRASQSI SSFLAWYQQK PGQAPRLLIY DASYRATGIP | 60 |
| ARFSGSGSGT DFTLTISSLE PEDYAVYYCQ QRGNWPITFG QGTRLEIK | 108 |
| HC for Fab M304-E11 | |
| (SEQ ID NO: 1227) | |
| EVQLLESGGG LVQPGGSLRL SCAASGFTFS YYDMWWVRQA PGKGLEWVSV ISSSGGGTFY | 60 |
| ADSVKGRFTI SRDNSKNTLY LQMNSLRAED TAVYYCAKDR AYGDYVGWNG FDYWGQGTLV | 120 |
| TVSS | 124 |
| LC for Fab M301-B04 | |
| (SEQ ID NO: 1228) | |
| QDIQMTQSPA TLSLSPGERA TLSCRASQSI SSFLAWYQQK PGQAPRLLIY DASYRATGIP | 60 |
| ARFSGSGSGT DFTLTISSLE PEDYAVYYCQ QRGNWPITFG QGTRLEIK | 108 |
| HC for Fab M301-B04 | |
| (SEQ ID NO: 1229) | |
| EVQLLESGGG LVQPGGSLRL SCAASGFTFS YYDMWWVRQA PGKGLEWVSV IYPSGGTTFY | 60 |
| ADSVKGRFTI SRDNSKNTLY LQMNSLRAED TAVYYCAKDR AYGDYVGWNG FDYWGQGTLV | 120 |
| TVSS | 124 |
| LC for Fab M301-A09 | |
| (SEQ ID NO: 1230) | |
| QDIQMTQSPA TLSLSPGERA TLSCRASQSI SSFLAWYQQK PGQAPRLLIY DASYRATGIP | 60 |
| ARFSGSGSGT DFTLTISSLE PEDYAVYYCQ QRGNWPITFG QGTRLEIK | 108 |
| HC for Fab M301-A09 | |
| (SEQ ID NO: 1231) | |
| EVQLLESGGG LVQPGGSLRL SCAASGFTFS YYDMWWVRQA PGKGLEWVSV IYPSGGYTAY | 60 |
| ADSVKGRFTI SRDNSKNTLY LQMNSLRAED TAVYYCAKDR AYGDYVGWNG FDYWGQGTLV | 120 |
| TVSS | 124 |
| LC for Fab M268-H12 | |
| (SEQ ID NO: 1232) | |
| QDIQMTQSPA TLSLSPGERA TLSCRASQSI SSFLAWYQQK PGQAPRLLIY DASYRATGIP | 60 |
| ARFSGSGSGT DFTLTISSLE PEDYAVYYCQ QRGNWPITFG QGTRLEIK | 108 |
| HC for Fab M268-H12 | |
| (SEQ ID NO: 1233) | |
| EVQLLESGGG LVQPGGSLRL SCAASGFTFS YYDMWWVRQA PGKGLEWVSY ISSSGGGTYY | 60 |
| ADSVKGRFTI SRDNSKNTLY LQMNSLRAED TAVYYCAKDR AYGDYVGWNG FDYWGQGTLV | 120 |
| TVSS | 124 |
| LC for Fab M273-H09 | |
| (SEQ ID NO: 1234) | |
| QDIQMTQSPA TLSLSPGERA TLSCRASQSI SSFLAWYQQK PGQAPRLLIY DASYRATGIP | 60 |
| ARFSGSGSGT DFTLTISSLE PEDYAVYYCQ QRGNWPITFG QGTRLEIK | 108 |
| HC for Fab M273-H09 | |
| (SEQ ID NO: 1235) | |
| EVQLLESGGG LVQPGGSLRL SCAASGFTFS YYEMWWVRQA PGKGLEWVSY ISSSGGFTSY | 60 |
| ADSVKGRFTI SRDNSKNTLY LQMNSLRAED TAVYYCAKDR AYGDYVGWNG FDYWGQGTLV | 120 |
| TVSS | 124 |
| LC for Fab M303-A02 | |
| (SEQ ID NO: 1236) | |
| QDIQMTQSPA TLSLSPGERA TLSCRASQSI SSFLAWYQQK PGQAPRLLIY DASYRATGIP | 60 |
| ARFSGSGSGT DFTLTISSLE PEDYAVYYCQ QRGNWPITFG QGTRLEIK | 108 |
| HC for Fab M303-A02 | |
| (SEQ ID NO: 1237) | |
| EVQLLESGGG LVQPGGSLRL SCAASGFTFS YYGMWWVRQA PGKGLEWVSV ISPSGGGTFY | 60 |
| ADSVKGRFTI SRDNSKNTLY LQMNSLRAED TAVYYCAKDR AYGDYVGWNG FDYWGQGTLV | 120 |
| TVSS | 124 |
| LC for Fab M273-G09 | |
| (SEQ ID NO: 1238) | |
| QDIQMTQSPA TLSLSPGERA TLSCRASQSI SSFLAWYQQK PGQAPRLLIY DASYRATGIP | 60 |
| ARFSGSGSGT DFTLTISSLE PEDYAVYYCQ QRGNWPITFG QGTRLEIK | 108 |
| HC for Fab M273-G09 | |
| (SEQ ID NO: 1239) | |
| EVQLLESGGG LVQPGGSLRL SCAASGFTFS YYMMIWVRQA PGKGLEWVSG IVSSGGFTMY | 60 |
| ADSVKGRFTI SRDNSKNTLY LQMNSLRAED TAVYYCAKDR AYGDYVGWNG FDYWGQGTLV | 120 |
| TVSS | 124 |
| LC for Fab M274-A08 | |
| (SEQ ID NO: 1240) | |
| QDIQMTQSPA TLSLSPGERA TLSCRASQSI SSFLAWYQQK PGQAPRLLIY DASYRATGIP | 60 |
| ARFSGSGSGT DFTLTISSLE PEDYAVYYCQ QRGNWPITFG QGTRLEIK | 108 |
| HC for Fab M274-A08 | |
| (SEQ ID NO: 1241) | |
| EVQLLESGGG LVQPGGSLRL SCAASGFTFS YYMMWWVRQA PGKGLEWVSS ISSSGGGTFY | 60 |
| ADSVKGRFTI SRDNSKNTLY LQMNSLRAED TAVYYCAKDR AYGDYVGWNG FDYWGQGTLV | 120 |
| TVSS | 124 |
| LC for Fab M268-H06 | |
| (SEQ ID NO: 1242) | |
| QDIQMTQSPA TLSLSPGERA TLSCRASQSI SSFLAWYQQK PGQAPRLLIY DASYRATGIP | 60 |
| ARFSGSGSGT DFTLTISSLE PEDYAVYYCQ QRGNWPITFG QGTRLEIK | 108 |
| HC for Fab M268-H06 | |
| (SEQ ID NO: 1243) | |
| EVQLLESGGG LVQPGGSLRL SCAASGFTFS YYMMWWVRQA PGKGLEWVSS IYSSGGATFY | 60 |
| ADSVKGRFTI SRDNSKNTLY LQMNSLRAED TAVYYCAKDR AYGDYVGWNG FDYWGQGTLV | 120 |
| TVSS | 124 |
| LC for Fab M273-F05 | |
| (SEQ ID NO: 1244) | |
| QDIQMTQSPA TLSLSPGERA TLSCRASQSI SSFLAWYQQK PGQAPRLLIY DASYRATGIP | 60 |
| ARFSGSGSGT DFTLTISSLE PEDYAVYYCQ QRGNWPITFG QGTRLEIK | 108 |
| HC for Fab M273-F05 | |
| (SEQ ID NO: 1245) | |
| EVQLLESGGG LVQPGGSLRL SCAASGFTFS YYNMWWVRQA PGKGLEWVSS ISPSGGGTYY | 60 |
| ADSVKGRFTI SRDNSKNTLY LQMNSLRAED TAVYYCAKDR AYGDYVGWNG FDYWGQGTLV | 120 |
| TVSS | 124 |
| LC for Fab M268-E02 | |
| (SEQ ID NO: 1246) | |
| QDIQMTQSPA TLSLSPGERA TLSCRASQSI SSFLAWYQQK PGQAPRLLIY DASYRATGIP | 60 |
| ARFSGSGSGT DFTLTISSLE PEDYAVYYCQ QRGNWPITFG QGTRLEIK | 108 |
| HC for Fab M268-E02 | |
| (SEQ ID NO: 1247) | |
| EVQLLESGGG LVQPGGSLRL SCAASGFTFS YYPMFWVRQA PGKGLEWVSY ISPSGGWTDY | 60 |
| ADSVKGRFTI SRDNSKNTLY LQMNSLRAED TAVYYCAKDR AYGDYVGWNG FDYWGQGTLV | 120 |
| TVSS | 124 |
| LC for Fab M271-E09 | |
| (SEQ ID NO: 1248) | |
| QDIQMTQSPA TLSLSPGERA TLSCRASQSI SSFLAWYQQK PGQAPRLLIY DASYRATGIP | 60 |
| ARFSGSGSGT DFTLTISSLE PEDYAVYYCQ QRGNWPITFG QGTRLEIK | 108 |
| HC for Fab M271-E09 | |
| (SEQ ID NO: 1249) | |
| EVQLLESGGG LVQPGGSLRL SCAASGFTFS YYPMIWVRQA PGKGLEWVSW ISPSGGGTQY | 60 |
| ADSVKGRFTI SRDNSKNTLY LQMNSLRAED TAVYYCAKDR AYGDYVGWNG FDYWGQGTLV | 120 |
| TVSS | 124 |
| LC for Fab M275-G05 | |
| (SEQ ID NO: 1250) | |
| QDIQMTQSPA TLSLSPGERA TLSCRASQSI SSFLAWYQQK PGQAPRLLIY DASYRATGIP | 60 |
| ARFSGSGSGT DFTLTISSLE PEDYAVYYCQ QRGNWPITFG QGTRLEIK | 108 |
| HC for Fab M275-G05 | |
| (SEQ ID NO: 1251) | |
| EVQLLESGGG LVQPGGSLRL SCAASGFTFS YYPMVWVRQA PGKGLEWVSY IWPSGGTYYA | 60 |
| DSVKGRFTIS RDNSKNTLYL QMNSLRAEDT AVYYCAKDRA YGDYVGWNGF DYWGQGTLVT | 120 |
| VSS | 123 |
| LC for Fab M277-G02 | |
| (SEQ ID NO: 1252) | |
| QDIQMTQSPA TLSLSPGERA TLSCRASQSI SSFLAWYQQK PGQAPRLLIY DASYRATGIP | 60 |
| ARFSGSGSGT DFTLTISSLE PEDYAVYYCQ QRGNWPITFG QGTRLEIK | 108 |
| HC for Fab M277-G02 | |
| (SEQ ID NO: 1253) | |
| EVQLLESGGG LVQPGGSLRL SCAASGFTFS YYPMWWVRQA PGKGLEWVSS IVPSGGATFY | 60 |
| ADSVKGRFTI SRDNSKNTLY LQMNSLRAED TAVYYCAKDR AYGDYVGWNG FDYWGQGTLV | 120 |
| TVSS | 124 |
| LC for Fab M270-H05 | |
| (SEQ ID NO: 1254) | |
| QDIQMTQSPA TLSLSPGERA TLSCRASQSI SSFLAWYQQK PGQAPRLLIY DASYRATGIP | 60 |
| ARFSGSGSGT DFTLTISSLE PEDYAVYYCQ QRGNWPITFG QGTRLEIK | 108 |
| HC for Fab M270-H05 | |
| (SEQ ID NO: 1255) | |
| EVQLLESGGG LVQPGGSLRL SCAASGFTFS YYPMWWVRQA PGKGLEWVSV IYPSGGATFY | 60 |
| ADSVKGRFTI SRDNSKNTLY LQMNSLRAED TAVYYCAKDR AYGDYVGWNG FDYWGQGTLV | 120 |
| TVSS | 124 |
| LC for Fab M273-A06 | |
| (SEQ ID NO: 1256) | |
| QDIQMTQSPA TLSLSPGERA TLSCRASQSI SSFLAWYQQK PGQAPRLLIY DASYRATGIP | 60 |
| ARFSGSGSGT DFTLTISSLE PEDYAVYYCQ QRGNWPITFG QGTRLEIK | 108 |
| HC for Fab M273-A06 | |
| (SEQ ID NO: 1257) | |
| EVQLLESGGG LVQPGGSLRL SCAASGFTFS YYPMWWVRQA PGKGLEWVSY ISSSGGGTHY | 60 |
| ADSVKGRFTI SRDNSKNTLY LQMNSLRAED TAVYYCAKDR AYGDYVGWNG FDYWGQGTLV | 120 |
| TVSS | 124 |
| LC for Fab M276-F08 | |
| (SEQ ID NO: 1258) | |
| QDIQMTQSPA TLSLSPGERA TLSCRASQSI SSFLAWYQQK PGQAPRLLIY DASYRATGIP | 60 |
| ARFSGSGSGT DFTLTISSLE PEDYAVYYCQ QRGNWPITFG QGTRLEIK | 108 |
| HC for Fab M276-F08 | |
| (SEQ ID NO: 1259) | |
| EVQLLESGGG LVQPGGSLRL SCAASGFTFS YYPMWWVRQA PGKGLEWVSY IVPSGGATFY | 60 |
| ADSVKGRFTI SRDNSKNTLY LQMNSLRAED TAVYYCAKDR AYGDYVGWNG FDYWGQGTLV | 120 |
| TVSS | 124 |

VL, VH and part of the constant region for M0237-D02, M0275-D03, M0273-G07, M0273-C10, M0273-A11, M0276-F11, M0275-E12, M0274-G08, M0272-H08, M0273-B10, M0301-D12, M0307-F04, M0299-A12, M0301-A09, M256-D11, M299-C08, M281-F06, and M306-D04 Fabs affinity matured for binding to hMMP9, hMMP2, mMMP9, and mMMP2

| M0237-D02-LC | |
|---|---|
| SEQ ID NO: 1 | |
| EIVLTQSPAT LSLSPGERAT LSCRASQSIS SFLAWYQQKP GQAPRLLIYD ASYRATGIPA | 60 |
| RFSGSGSGTD FTLTISSLEP EDFAVYYCQQ RGNWPITFGQ GTRLEIKRTV AAPSV | 115 |
| M0237-D02-HC | |
| SEQ ID NO: 2 | |
| EVQLLESGGG LVQPGGSLRL SCAASGFTFS QYPMWWVRQA PGKGLEWVSY IVPSGGRTYY | 60 |
| ADSVKGRFTI SRDNSKNTLY LQMNSLRAED TAVYYCAKDR AYGDYVGWNG FDYWGQGTLV | 120 |
| TVSSASTKG | 129 |
| M0275-D03-LC | |
| SEQ ID NO: 3 | |
| QDIQMTQSPA TLSLSPGERA TLSCRASQSI SSFLAWYQQK PGQAPRLLIY DASYRATGIP | 60 |
| ARFSGSGSGT DFTLTISSLE PEDYAVYYCQ QRGNWPITFG QGTRLEIKRT VAAPS | 115 |
| M0275-D03-HC | |
| SEQ ID NO: 4 | |
| EVQLLESGGG LVQPGGSLRL SCAASGFTFS QYDMWWVRQA PGKGLEWVSV IYPSGTTFYA | 60 |
| DSVKGRFTIS RDNSKNTLYL QMNSLRAEDT AVYYCAKDRA YGDYVGWNGF DYWGQGTLVT | 120 |
| VSSASTKGPS VFPLAPSSKS | 140 |
| M0273-G07-LC | |
| SEQ ID NO: 5 | |
| QDIQMTQSPA TLSLSPGERA TLSCRASQSI SSFLAWYQQK PGQAPRLLIY DASYRATGIP | 60 |
| ARFSGSGSGT DFTLTISSLE PEDYAVYYCQ QRGNWPITFG QGTRLEIKRT VAAPS | 115 |
| M0273-G07-HC | |
| SEQ ID NO: 6 | |
| EVQLLESGGG LVQPGGSLRL SCAASGFTFS HYDMWWVRQA PGKGLEWVSV IYPSGGPTYY | 60 |
| ADSVKGRFTI SRDNSKNTLY LQMNSLRAED TAVYYCAKDR AYGDYVGWNG FDYWGQGTLV | 120 |
| TVSSASTKGP SVFPLAPSSKS | 141 |
| M0273-C10-LC | |
| SEQ ID NO: 7 | |
| QDIQMTQSPA TLSLSPGERA TLSCRASQSI SSFLAWYQQK PGQAPRLLIY DASYRATGIP | 60 |
| ARFSGSGSGT DFTLTISSLE PEDYAVYYCQ QRGNWPITFG QGTRLEIKRT VAAPS | 115 |
| M0273-C10-HC | |
| SEQ ID NO: 8 | |
| EVQLLESGGG LVQPGGSLRL SCAASGFTFS FYPMWWVRQA PGKGLEWVSY IYPSGGATFY | 60 |
| ADSVKGRFTI SRDNSKNTLY LQMNSLRAED TAVYYCAKDR AYGDYVGWNG FDYWGQGTLV | 120 |
| TVSSASTKGP SVFPLAPSSKS | 141 |
| M0273-A11-LC | |
| SEQ ID NO: 9 | |
| QDIQMTQSPA TLSLSPGERA TLSCRASQSI SSFLAWYQQK PGQAPRLLIY DASYRATGIP | 60 |
| ARFSGSGSGT DFTLTISSLE PEDYAVYYCQ QRGNWPITFG QGTRLEIKRT VAAPS | 115 |
| M0273-A11-HC | |
| SEQ ID NO: 10 | |
| EVQLLESGGG LVQPGGSLRL SCAASGFTFS RYDMWWVRQA PGKGLEWVSV ISPSGGATFY | 60 |
| ADSVKGRFTI SRDNSKNTLY LQMNSLRAED TAVYYCAKDR AYGDYVGWNG FDYWGQGTLV | 120 |
| TVSSASTKGP SVFPLAPSSKS | 141 |
| M0276-F11-LC | |
| SEQ ID NO: 11 | |
| QDIQMTQSPA TLSLSPGERA TLSCRASQSI SSFLAWYQQK PGQAPRLLIY DASYRATGIP | 60 |
| ARFSGSGSGT DFTLTISSLE PEDYAVYYCQ QRGNWPITFG QGTRLEIKRT VAAPS | 115 |
| M0276-F11-HC | |
| SEQ ID NO: 12 | |
| EVQLLESGGG LVQPGGSLRL SCAASGFTFS WYDMWWVRQA PGKGLEWVSV IYSSGGPTFY | 60 |
| ADSVKGRFTI SRDNSKNTLY LQMNSLRAED TAVYYCAKDR AYGDYVGWNG FDYWGQGTLV | 120 |
| TVSSASTKGP SVFPLAPSSKS | 141 |
| M0275-E12-LC | |
| SEQ ID NO: 13 | |
| QDIQMTQSPA TLSLSPGERA TLSCRASQSI SSFLAWYQQK PGQAPRLLIY DASYRATGIP | 60 |
| ARFSGSGSGT DFTLTISSLE PEDYAVYYCQ QRGNWPITFG QGTRLEIKRT VAAPS | 115 |
| M0275-E12-HC | |
| SEQ ID NO: 14 | |
| EVQLLESGGG LVQPGGSLRL SCAASGFTFS HYDMWWVRQA PGKGLEWVSV IYSSGGFTGY | 60 |
| ADSVKGRFTI SRDNSKNTLY LQMNSLRAED TAVYYCAKDR AYGDYVGWNG FDYWGQGTLV | 120 |
| TVSSASTKGP SVFPLAPSSKS | 141 |
| M0274-G08-LC | |
| SEQ ID NO: 15 | |
| QDIQMTQSPA TLSLSPGERA TLSCRASQSI SSFLAWYQQK PGQAPRLLIY DASYRATGIP | 60 |
| ARFSGSGSGT DFTLTISSLE PEDYAVYYCQ QRGNWPITFG QGTRLEIKRT VAAPS | 115 |
| M0274-G08-HC | |
| SEQ ID NO: 16 | |
| EVQLLESGGG LVQPGGSLRL SCAASGFTFS VYDMWWVRQA PGKGLEWVSV IYPSGGATYY | 60 |
| ADSVKGRFTI SRDNSKNTLY LQMNSLRAED TAVYYCAKDR AYGDYVGWNG FDYWGQGTLV | 120 |
| TVSSASTKGP SVFPLAPSSKS | 141 |
| M0272-H08-LC | |
| SEQ ID NO: 17 | |
| QDIQMTQSPA TLSLSPGERA TLSCRASQSI SSFLAWYQQK PGQAPRLLIY DASYRATGIP | 60 |
| ARFSGSGSGT DFTLTISSLE PEDYAVYYCQ QRGNWPITFG QGTRLEIKRT VAAPS | 115 |
| M0272-H08-HC | |
| SEQ ID NO: 18 | |
| EVQLLESGGG LVQPGGSLRL SCAASGFTFS AYDMWWVRQA PGKGLEWVSV IYPSGGTTFY | 60 |
| ADSVKGRFTI SRDNSKNTLY LQMNSLRAED TAVYYCAKDR AYGDYVGWNG FDYWGQGTLV | 120 |
| TVSSASTKGP SVFPLAPSSKS | 141 |
| M0273-B10-LC | |
| SEQ ID NO: 19 | |
| QDIQMTQSPA TLSLSPGERA TLSCRASQSI SSFLAWYQQK PGQAPRLLIY DASYRATGIP | 60 |
| ARFSGSGSGT DFTLTISSLE PEDYAVYYCQ QRGNWPITFG QGTRLEIKRT VAAPS | 115 |
| M0273-B10-HC | |
| SEQ ID NO: 20 | |
| EVQLLESGGG LVQPGGSLRL SCAASGFTFS KYAMIWVRQA PGKGLEWVSW IPPSGGYTSY | 60 |
| ADSVKGRFTI SRDNSKNTLY LQMNSLRAED TAVYYCAKDR AYGDYVGWNG FDYWGQGTLV | 120 |
| TVSSASTKGP SVFPLAPSSKS | 141 |
| M0301-D12-LC | |
| SEQ ID NO: 21 | |
| QDIQMTQSPA TLSLSPGERA TLSCRASQSI SSFLAWYQQK PGQAPRLLIY DASYRATGIP | 60 |
| ARFSGSGSGT DFTLTISSLE PEDYAVYYCQ QRGNWPITFG QGTRLEIKRT VAAPS | 115 |
| M0301-D12-HC | |
| SEQ ID NO: 22 | |
| EVQLLESGGG LVQPGGSLRL SCAASGFTFS MYDMWWVRQA PGKGLEWVSV IYSSGGYTSY | 60 |
| ADSVKGRFTI SRDNSKNTLY LQMNSLRAED TAVYYCAKDR AYGDYVGWNG FDYWGQGTLV | 120 |
| TVSSASTKGP SVFPLAPSSKS | 141 |
| M0307-F04-LC | |
| SEQ ID NO: 23 | |
| QDIQMTQSPA TLSLSPGERA TLSCRASQSI SSFLAWYQQK PGQAPRLLIY DASYRATGIP | 60 |
| ARFSGSGSGT DFTLTISSLE PEDYAVYYCQ QRGNWPITFG QGTRLEIKRT VAAPS | 115 |
| M0307-F04-HC | |
| SEQ ID NO: 24 | |
| EVQLLESGGG LVQPGGSLRL SCAASGFTFS LYDMWWVRQA PGKGLEWVSV IYSSGGYTGY | 60 |
| ADSVKGRFTI SRDNSKNTLY LQMNSLRAED TAVYYCAKDR AYGDYVGWNG FDYWGQGTLV | 120 |
| TVSSASTKGP SVFPLAPSSKS | 141 |
| M0299-A12-LC | |
| SEQ ID NO: 25 | |
| QDIQMTQSPA TLSLSPGERA TLSCRASQSI SSFLAWYQQK PGQAPRLLIY DASYRATGIP | 60 |
| ARFSGSGSGT DFTLTISSLE PEDYAVYYCQ QRGNWPITFG QGTRLEIKRT VAAPS | 115 |
| M0299-A12-HC | |
| SEQ ID NO: 26 | |
| EVQLLESGGG LVQPGGSLRL SCAASGFTFS HYPMWWVRQA PGKGLEWVSY ISSSGGGTFY | 60 |
| ADSVKGRFTI SRDNSKNTLY LQMNSLRAED TAVYYCAKDR AYGDYVGWNG FDYWGQGTLV | 120 |
| TVSSASTKGP SVFPLAPSSKS | 141 |
| M0301-A09-LC | |
| SEQ ID NO: 27 | |
| QDIQMTQSPA TLSLSPGERA TLSCRASQSI SSFLAWYQQK PGQAPRLLIY DASYRATGIP | 60 |
| ARFSGSGSGT DFTLTISSLE PEDYAVYYCQ QRGNWPITFG QGTRLEIKRT VAAPS | 115 |
| M0301-A09-HC | |
| SEQ ID NO: 28 | |
| EVQLLESGGG LVQPGGSLRL SCAASGFTFS YYDMWWVRQA PGKGLEWVSV IYPSGGYTAY | 60 |
| ADSVKGRFTI SRDNSKNTLY LQMNSLRAED TAVYYCAKDR AYGDYVGWNG FDYWGQGTLV | 120 |
| TVSSASTKGP SVFPLAPSSKS | 141 |
| M0256-D11-LC | |
| SEQ ID NO: 29 | |
| QDIQMTQSPA TLSLSPGERA TLSCRASQSI SSFLAWYQQK PGQAPRLLIY DASYRATGIP | 60 |
| ARFSGSGSGT DFTLTISSLE PEDYAVYYCQ QRGNWPITFG QGTRLEIKRT VAAPS | 115 |
| M0256-D11-HC | |
| SEQ ID NO: 30 | |
| EVQLLESGGG LVQPGGSLRL SCAASGFTFS HYDMWWVRQA PGKGLEWVSV IYSSGGPTFY | 60 |
| ADSVKGRFTI SRDNSKNTLY LQMNSLRAED TAVYYCAKDR AYGDYVGWNG FDYWGQGTLV | 120 |
| TVSSASTKGP SVFPLAPSSKS | 141 |
| M0299-C09-LC | |
| SEQ ID NO: 31 | |
| QDIQMTQSPA TLSLSPGERA TLSCRASQSI SSFLAWYQQK PGQAPRLLIY DASYRATGIP | 60 |
| ARFSGSGSGT DFTLTISSLE PEDYAVYYCQ QRGNWPITFG QGTRLEIKRT VAAPS | 115 |
| M0299-C09-HC | |
| SEQ ID NO: 32 | |
| EVQLLESGGG LVQPGGSLRL SCAASGFTFS NYPMWWVRQA PGKGLEWVSY IVPSGGATFY | 60 |
| ADSVKGRFTI SRDNSKNTLY LQMNSLRAED TAVYYCAKDR AYGDYVGWNG FDYWGQGTLV | 120 |
| TVSS | 124 |
| M0281-F06-LC | |
| SEQ ID NO: 33 | |
| QDIQMTQSPA ALSLSPGERA TLSCRASQSV SSDLAWYQQK PGQAPRLLIY GASTRATGIP | 60 |
| ARFSGSRSGT AFTLTISSLE PEDFAVYYCQ QRSNWPVTFG QGTKLEIKRT VAAPS | 115 |
| M0281-F06-HC | |
| SEQ ID NO: 34 | |
| EVQLLESGGG LVQPGGSLRL SCAASGFTFS QYPMWWVRQA PGKGLEWVSY IVPSGGRTYY | 60 |
| ADSVKGRFTI SRDNSKNTLY LQMNSLRAED TAVYYCAKDR AYGDYVGWNG FDYWGQGTLV | 120 |
| TVSS | 124 |
| M0306-D04-LC | |
| SEQ ID NO: 35 | |
| QDIQMTQSPA TLSLSPGERA TLSCRASQSI SSFLAWYQQK PGQAPRLLIY DASYRATGIP | 60 |
| ARFSGSGSGT DFTLTISSLE PEDYAVYYCQ QRGNWPITFG QGTRLEIK RT VAAPS | 115 |
| M0306-D04-HC | |
| SEQ ID NO: 36 | |
| EVQLLESGGG LVQPGGSLRL SCAASGFTFS LYPMWWVRQA PGKGLEWVSS IYPSGGATFY | 60 |
| ADSVKGRFTI SRDNSKNTLY LQMNSLRAED TAVYYCAKDR AYGDYVGWNG FDYWGQGTLV | 120 |
| TVSS | 124 |

TABLE 6
Difference in CDR1 and CDR2 HCs for MMP9/2 derived
from M237-D02 at positions 25-66

```
                    FR1-------------CDR1-FR2------------CDR2-------------FR3---
                                        2 3 3 4 4 5 5 6 6
                                        5 0 5 0 5 0 a 5 a 0 5
HCM237-D02_parent SGFTFSQYPMWWVRQAPGKGLEWVSYIVPSGGRTY#YADSVKGR
3-23_wild_type_{———} ------S-A-S--------------A-SG---S--#--------
HCM256-D03_SIN11_{——} ------V---I----------------S----F-G#--------
HCM256-E10_SIN13_{——} ------D------------------V-Y----A-F#--------
HCM256-E03_SIN15_{——} ------T---I----------------S----Y-G#--------
HCM256-D11_SIN17_{——} ------H-D----------------V-YS---P-F#--------
HCM256-A04_SIN19_{——} ------H------------------S-S----A--#--------
HCM256-G09_SIN21_{——} ------K------------------S-Y----A-F#--------
HCM256-A07_SIN23_{——} ------H-D-L----------------SS---Y-G#--------
HCM256-C09_SIN25_{——} ------K--------------------SS---G-F#--------
HCM256-C07_SIN27_{——} ------L-D------------------SS---A-F#--------
HCM256-B03_SIN29_{——} ------R--------------------S----F-S#--------
HCM269-C02_SIN349_ ------T--------------------SS---G--#--------
HCM277-C02_SIN351_ ------A-D-I---------------------F-D#--------
HCM272-H08_SIN353_ ------A-D----------------V-Y----T-F#--------
HCM271-D10_SIN355_ ------A-D----------------V-YS---M-L#--------
HCM271-E12_SIN357_ ------A-D------------------SS---F-D#--------
HCM269-C06_SIN359_ ------A-E----------------S-Y----Y-D#--------
HCM271-G01_SIN361_ ------A-E----------------V-Y----G-F#--------
HCM270-F03_SIN363_ ------A-M----------------A-S----Y-G#--------
HCM270-G04_SIN365_ ------A-N-I---------------------F-G#--------
HCM268-E01_SIN367_ ------A---I---------------------A-F#--------
HCM269-E07_SIN369_ ------A---M----------------Y----G-F#--------
HCM299-C10_SIN371_ ------A-------------------------M--#--------
HCM274-D05_SIN373_ ------A--------------------Y----A-F#--------
HCM300-F10_SIN375_ ------D-A----------------S-Y----A-F#--------
HCM269-D11_SIN377_ ------D-A----------------W-S----G-L#--------
HCM271-D08_SIN379_ ------D-D-F--------------G--S---Y-G#--------
HCM268-A12_SIN381_ ------D-D----------------V-S----Y-G#--------
HCM277-A06_SIN383_ ------D-D----------------V-Y----F-G#--------
HCM272-E06_SIN385_ ------D-D----------------V-YSG-#S--#--------
HCM271-A10_SIN387_ ------D-D----------------V-YS---F-S#--------
HCM275-E06_SIN389_ ------D-D----------------V-YS---M--#--------
HCM277-E12_SIN391_ ------D-M----------------S-S----F-D#--------
HCM269-B06_SIN393_ ------D-N----------------V-Y----W-M#--------
HCM271-B04_SIN395_ ------D---F---------------------W-D#--------
HCM306-C02_SIN397_ ------D---F---------------------W-S#--------
HCM277-G06_SIN399_ ------D---I----------------S----Y-D#--------
HCM277-G04_SIN401_ ------D---I---------------------W-D#--------
HCM298-C05_SIN403_ ------D---I----------------Y----G--#--------
HCM268-C12_SIN405_ ------D--------------------SS---W-S#--------
HCM269-F03_SIN407_ ------D--------------------Y----A--#--------
HCM271-A08_SIN409_ ------D-Q----------------V-Y----A-F#--------
HCM272-D08_SIN411_ ------E-D----------------V-Y----P--#--------
HCM275-G03_SIN413_ ------E-D----------------V-YS---Y-G#--------
HCM271-A11_SIN415_ ------E-E----------------V-Y----Y-N#--------
HCM269-G06_SIN417_ ------E-N----------------V-Y----P-W#--------
HCM272-E03_SIN419_ ------E---F----------------S----W-S#--------
HCM276-G10_SIN421_ ------E---I----------------S----Y-G#--------
HCM269-H08_SIN423_ ------E------------------S-Y----A-F#--------
HCM300-A11_SIN425_ ------E-W----------------S-S----G-F#--------
HCM274-D02_SIN427_ ------F-D-F--------------V-SS---G-F#--------
HCM269-H01_SIN429_ ------F-D-L----------------SS---F-G#--------
HCM272-D07_SIN431_ ------F-D----------------S-YS---A-F#--------
HCM271-A12_SIN433_ ------F-D----------------V-YS---A-F#--------
HCM270-G05_SIN435_ ------F-D----------------V-YS---F-D#--------
HCM270-C10_SIN437_ ------F-D------------------SS---G-F#--------
HCM269-D09_SIN439_ ------F-D-Y--------------S------A-F#--------
HCM277-B07_SIN441_ ------F-E------------------S----G--#--------
HCM300-H04_SIN443_ ------F-H-I----------------YS---#-F#--------
HCM271-H08_SIN445_ ------F-M----------------S-S----A-F#--------
HCM306-H03_SIN447_ ------F-N----------------S-S----G-F#--------
HCM275-F06_SIN449_ ------F-N----------------V-Y----K--#--------
HCM299-C08_SIN451_ ------F-N----------------V-Y----P-F#--------
HCM274-D08_SIN453_ ------F---I----------------S----S-L#--------
HCM303-H07_SIN455_ ------F---I----------------SS---F-D#--------
HCM272-C10_SIN457_ ------F---I----------------SS---Y-S#--------
HCM269-C08_SIN459_ ------F---L----------------S#G-#Y-G#--------
HCM270-F07_SIN461_ ------F---M----------------SF---Y-G#--------
HCM273-C10_SIN463_ ------F--------------------Y----A-F#--------
HCM275-H08_SIN465_ ------G-D----------------V-S----G-F#--------
HCM269-C11_SIN467_ ------G-D----------------V-YS---T-F#--------
HCM304-B05_SIN469_ ------G-N----------------V-Y----A-F#--------
HCM276-F12_SIN471_ ------G--------------------SS---G-F#--------
HCM299-D06_SIN473_ ------H-A-I---------------------W-D#--------
HCM271-G12_SIN475_ ------H-A-I---------------------W-G#--------
HCM272-G11_SIN477_ ------H-D----------------S-S----A-F#--------
HCM269-B12_SIN479_ ------H-D----------------V--S--#K-F#--------
HCM268-A01_SIN481_ ------H-D----------------V-Y----F-D#--------
HCM277-B12_SIN483_ ------H-D----------------V-Y----H-L#--------
HCM273-G07_SIN485_ ------H-D----------------V-Y----P--#--------
HCM274-F01_SIN487_ ------H-D----------------V-Y----V--#--------
HCM275-E12_SIN489_ ------H-D----------------V-YS---F-G#--------
HCM298-E01_SIN491_ ------H-D----------------V-YS---P--#--------
HCM274-G10_SIN493_ ------H-D------------------S----F-S#--------
HCM268-G01_SIN495_ ------H-E----------------S-SS---G-F#--------
HCM269-H02_SIN497_ ------H-E------------------GS---S--#--------
HCM277-G05_SIN499_ ------H-M-I--------------G-S----Y-G#--------
HCM271-H01_SIN501_ ------H-M----------------S-Y----G--#--------
HCM303-F06_SIN503_ ------H-M----------------S-Y----#--#--------
HCM272-B03_SIN505_ ------H---F----------------SS---W-D#--------
HCM272-B04_SIN507_ ------H---I----------------S----G-F#--------
HCM272-H03_SIN509_ ------H---I----------------SS---G-F#--------
HCM274-G12_SIN511_ ------H---I----------------YS---G-F#--------
HCM274-F02_SIN513_ ------H---L----------------Y----G-F#--------
HCM276-H11_SIN515_ ------H---M----------------SS---Y-G#--------
HCM303-C04_SIN517_ ------H---M----------------YS---G--#--------
HCM276-G09_SIN519_ ------H---V----------------S----Y-G#--------
HCM298-D05_SIN521_ ------H------------------S-S----A-F#--------
HCM305-G05_SIN523_ ------H------------------V-YS---G-F#--------
HCM269-D03_SIN525_ ------H------------------W------F-L#--------
HCM275-A08_SIN527_ ------H--------------------H----G-L#--------
HCM299-A12_SIN529_ ------H--------------------SS---G-F#--------
HCM302-D10_SIN531_ ------H-------------------------A-F#--------
HCM272-H12_SIN533_ ------H--------------------Y----G--#--------
HCM304-G08_SIN535_ ------H-Q----------------S-SS---G--#--------
HCM298-A01_SIN537_ ------H-S-M----D-----------S----Y-G#--------
HCM272-E07_SIN539_ ------H-S----------------V-Y----A-F#--------
HCM268-F03_SIN541_ ------I-D----------------V-S----S--#--------
HCM268-B08_SIN543_ ------I-D----------------V-Y----A-W#--------
HCM271-A03_SIN545_ ------I-D----------------V-Y----P-F#--------
HCM270-G02_SIN547_ ------I-D----------------V-Y----V-F#--------
HCM277-H05_SIN549_ ------I-D----------------V-YS---F-G#--------
HCM273-F04_SIN551_ ------I---I----------------S----Y-S#--------
HCM268-G10_SIN553_ ------I--------------------S----F-S#--------
HCM300-F01_SIN555_ ------I--------------------S----G--#--------
HCM273-H03_SIN557_ ------I--------------------SS---W-D#--------
HCM277-C11_SIN559_ ------I-------------------------M--#--------
HCM273-G06_SIN561_ ------I--------------------Y----G-F#--------
HCM273-B10_SIN563_ ------K-A-I--------------W-P----Y-S#--------
HCM272-F08_SIN565_ ------K-A-I----------------S----F-G#--------
HCM270-G12_SIN567_ ------K-A-I----S-----------SS---F-D#--------
HCM274-H05_SIN569_ ------K-A----------------S-S----G-F#--------
HCM271-F05_SIN571_ ------K-A-------------------------F#--------
HCM273-H08_SIN573_ ------K-D-F--------------S------A--#--------
HCM271-H02_SIN575_ ------K-D-I--------------W-G----A-M#--------
HCM306-A12_SIN577_ ------K-D-I----------------GS---Y-G#--------
HCM271-B06_SIN579_ ------K-D----------------S-SS---G-F#--------
HCM271-D01_SIN581_ ------K-D----------------V-Y----P-F#--------
HCM269-H03_SIN583_ ------K-D----------------V-Y----Q--#--------
HCM274-E01_SIN585_ ------K-D----------------V-Y----S--#--------
HCM275-B12_SIN587_ ------K-D----------------V-YS---F-L#--------
HCM270-H06_SIN589_ ------K-D----------------V-YS---F-S#--------
HCM271-A04_SIN591_ ------K-D----------------V-YS---P-F#--------
HCM272-C09_SIN593_ ------K-D------------------G----F-D#--------
HCM274-G09_SIN595_ ------K-D------------------SS---F-D#--------
HCM299-F05_SIN597_ ------K-D-----------------------FID#--------
HCM275-B05_SIN599_ ------K-E-F--------------S-SS---G-F#--------
HCM271-H04_SIN601_ ------K-E----------------V-Y----M--#--------
HCM277-D11_SIN603_ ------K-E----------------V-Y----Y-G#--------
HCM268-B02_SIN605_ ------K-E----------------V-YS---K--#--------
HCM275-E04_SIN607_ ------K-E------------------G----F-D#--------
HCM275-D12_SIN609_ ------K-E------------------G----I-M#--------
HCM270-A02_SIN611_ ------K-E------------------S----G-L#--------
HCM277-F09_SIN613_ ------K-M-F--------------S-YS-----F#--------
HCM269-G12_SIN615_ ------K-N----------------S-Y----A-F#--------
HCM273-G04_SIN617_ ------K-N----------------V-Y----A-F#--------
HCM269-G04_SIN619_ ------K---F---------------------Y-S#--------
HCM269-B01_SIN621_ ------K---I----------------S----Y-G#--------
HCM268-B06_SIN623_ ------K---I----------------S----Y-S#--------
HCM272-A11_SIN625_ ------K---I----------------SS---W-D#--------
HCM274-H02_SIN627_ ------K---I----------------Y----A--#--------
HCM275-C12_SIN629_ ------K---I----------------Y----Y-S#--------
HCM268-G12_SIN631_ ------K---I----------------YS---G--#--------
HCM271-C02_SIN633_ ------K---M----------------S----F-D#--------
HCM268-E09_SIN635_ ------K---M----------------Y----Y-D#--------
HCM274-F09_SIN637_ ------K---M----------------Y----Y-G#--------
HCM271-F02_SIN639_ ------K------------------S--S---A--#-T------
HCM276-B12_SIN641_ ------K------------------S-Y----Y-G#--------
HCM272-H09_SIN643_ ------K------------------V-S----A--#--------
HCM272-G02_SIN645_ ------K------------------V-Y----Y-A#--------
HCM274-E04_SIN647_ ------K------------------V-YS---G-F#--------
HCM303-B07_SIN649_ ------K--------------------S----G-L#--------
HCM275-D06_SIN651_ ------K--------------------S----G--#--------
HCM271-D04_SIN653_ ------K--------------------SS---G--#--------
HCM268-H03_SIN655_ ------K-------------------------A-F#--------
HCM272-A03_SIN657_ ------K-------------------------P-W#--------
HCM274-G07_SIN659_ ------K-------------------------W-A#--------
HCM270-E01_SIN661_ ------K-Q----------------S-Y----A-F#--------
HCM270-G09_SIN663_ ------K-Q----------------S-Y----G-F#--------
HCM272-B11_SIN665_ ------K-S-I---------------------Y-G#--------
HCM268-C03_SIN667_ ------K-S----------------S-Y----A-F#--------
HCM270-E10_SIN669_ ------K-S----------------V-Y----A-F#--------
HCM305-F06_SIN671_ ------K-S----------------V-Y----F-D#--------
HCM270-H04_SIN673_ ------K-T----------------V-Y----A-F#--------
HCM269-D05_SIN675_ ------K-W----------------V------M--#--------
HCM270-F02_SIN677_ ------K-Y----------------S-YS---G-F#--------
HCM275-D07_SIN679_ ------L-A-I----------------S----F-G#--------
HCM273-E12_SIN681_ ------L-A----------------S------K--#--------
HCM273-A09_SIN683_ ------L-A------------------Y----G--#--------
HCM271-G03_SIN685_ ------L-D-L----------------Y----F-G#--------
HCM299-F01_SIN687_ ------L-D-V--------------W-G----L-I#--------
HCM274-A03_SIN689_ ------L-D----------------S-SS---Y-G#--------
HCM276-B04_SIN691_ ------L-D----------------V-R----S--#--------
HCM269-B10_SIN693_ ------L-D----------------V-Y----P--#--------
HCM270-A05_SIN695_ ------L-D----------------V-YS---A-F#--------
HCM268-B11_SIN697_ ------L-D----------------V-YS---T-F#--------
HCM272-F10_SIN699_ ------L-D----------------V-YS---Y-A#--------
HCM307-F04_SIN701_ ------L-D----------------V-YS---Y-G#--------
HCM274-F08_SIN703_ ------L-D------------------G----N-L#--------
HCM275-D11_SIN705_ ------L-E----------------V-S----G--#--------
HCM269-B03_SIN707_ ------L-E------------------SS---G-L#--------
HCM269-F10_SIN709_ ------L-M-----K----------S-Y----#--#--------
HCM306-E11_SIN711_ ------L-N----------------V-Y----Y-G#--------
HCM271-B12_SIN713_ ------L---I----------------S----F-D#--------
HCM304-E07_SIN715_ ------L---M----------------Y----G-F#--------
HCM268-H02_SIN717_ ------L------------------S-S----A-F#--------
HCM301-B03_SIN719_ ------L------------------S-S----G-F#--------
HCM306-D04_SIN721_ ------L------------------S-Y----A-F#--------
HCM270-D05_SIN723_ ------L------------------V-YS---A-F#--------
HCM269-C07_SIN725_ ------L------------------W------F-L#--------
HCM269-G10_SIN727_ ------L--------------------S----G-L#--------
HCM274-A12_SIN729_ ------L--------------------SS---G--#--------
HCM272-B10_SIN731_ ------L-------------------------G-F#--------
HCM302-A05_SIN733_ ------L---------------------S---A-F#--------
HCM273-D07_SIN735_ ------L--------------------Y----A-M#--------
HCM274-C03_SIN737_ ------L-Q----------------V-Y----A--#--------
HCM272-E09_SIN739_ ------L-Q----------------V-Y----#-F#--------
HCM298-G03_SIN741_ ------M-D----------------V-S----G-F#--------
HCM268-E04_SIN743_ ------M-D----------------V-Y----N-L#--------
HCM270-A08_SIN745_ ------M-D----------------V-Y----P-F#--------
HCM268-C07_SIN747_ ------M-D----------------V-Y----Y-A#--------
HCM268-F02_SIN749_ ------M-D----------------V-YS---F-D#--------
HCM271-A05_SIN751_ ------M-D----------------V-YS---P-F#--------
HCM270-C12_SIN753_ ------M-D----------------V-YS---V-F#--------
HCM272-A02_SIN755_ ------M-D----------------V-YS---Y-A#--------
HCM299-F03_SIN757_ ------M-D----------------V-YS---Y-D#--------
HCM272-F05_SIN759_ ------M-D----------------V-YS---Y-N#--------
HCM301-D12_SIN761_ ------M-D----------------V-YS---Y-S#--------
HCM276-B10_SIN763_ ------M-D------------------SS---S-L#--------
HCM270-B05_SIN765_ ------M-M-I--------------S-Y----F-S#--------
HCM277-E11_SIN767_ ------M-N----------------S-S----A--#--------
HCM304-E02_SIN769_ ------M--II----------------S----F-G#--------
HCM307-E12_SIN771_ ------M---F----------------S----W-A#--------
HCM271-H07_SIN773_ ------M---F----------------S----W-D#--------
HCM274-C01_SIN775_ ------M---F---------------------W-D#--------
HCM268-D03_SIN777_ ------M---I----------------S----G-F#--------
HCM272-H01_SIN779_ ------M---I---------------------F-G#--------
HCM302-B06_SIN781_ ------M---L----------------S----Y-G#--------
HCM270-B11_SIN783_ ------M---T----------------S----Y-G#--------
HCM277-A10_SIN785_ ------M-S----------------V-Y----F-D#--------
HCM302-G12_SIN787_ ------M-W-L----------------S----G-F#--------
HCM276-C01_SIN789_ ------M-W----------------S-SS---Y-G#--------
HCM276-E07_SIN791_ ------N-A------------------S---#A--#--------
HCM268-C06_SIN793_ ------N-A------------------S----S--#--------
HCM273-F02_SIN795_ ------N-D-A--------------W-SS---F-D#--------
HCM270-B01_SIN797_ ------N-D-I--------------V-S----W-S#--------
HCM276-G04_SIN799_ ------N-D-I---------------------Y-A#--------
HCM270-H01_SIN801_ ------N-D----------------V-S----F-G#--------
HCM270-A10_SIN803_ ------N-D----------------V-SS---Y-G#--------
HCM269-A01_SIN805_ ------N-D----------------V-SS--#M--#--------
HCM271-E06_SIN807_ ------N-D----------------V------A--#--------
HCM271-F01_SIN809_ ------N-D----------------V-Y----A-F#--------
HCM271-E04_SIN811_ ------N-D----------------V-Y----I--#--------
HCM305-H10_SIN813_ ------N-D----------------V-Y----P--#--------
HCM272-D03_SIN815_ ------N-D----------------V-Y----Y-V#--------
HCM270-E12_SIN817_ ------N-D----------------V-YS---P--#--------
HCM299-A04_SIN819_ ------N-D----------------V-YS---Y-A#--------
HCM269-C03_SIN821_ ------N-D----------------W-SS---A-I#--------
HCM274-E09_SIN823_ ------N-D------------------SS---A-L#--------
HCM269-E04_SIN825_ ------N-E----------------V-YS--SA-F#--------
HCM271-F07_SIN827_ ------N-I----------------S-Y----A-L#--------
HCM272-F12_SIN829_ ------N-M-I--------------S-Y----Y-G#--------
HCM272-C01_SIN831_ ------N-M-I--------------S-YS---F-S#--------
HCM275-B11_SIN833_ ------N-M----------------S-G----G-F#--------
HCM275-F12_SIN835_ ------N-M----------------S-YS---G-F#--------
HCM268-C10_SIN837_ ------N-M----------------V-S----A--#--------
HCM303-C05_SIN839_ ------N-N-M----------------SS---Y-G#--------
HCM274-E08_SIN841_ ------N-N----------------V-Y----P-F#--------
HCM276-D12_SIN843_ ------N-N------------------S----G-L#--------
HCM299-A02_SIN845_ ------N---F----------------S----W-S#--------
HCM268-C05_SIN847_ ------N---I----------------S----G-F#--------
HCM276-H10_SIN849_ ------N---I----------------SS---Y-G#--------
HCM270-F10_SIN851_ ------N---I---------------------F-S#--------
HCM271-F12_SIN853_ ------N---I----------------Y----G--#--------
HCM301-H08_SIN855_ ------N---I----------------Y----#-F#--------
HCM304-D02_SIN857_ ------N------------------S-S----S--#--------
HCM268-G02_SIN859_ ------N------------------S------A--#--------
HCM271-D07_SIN861_ ------N------------------S-Y----A-F#--------
HCM269-F06_SIN863_ ------N------------------S-Y----KATY--------
HCM271-H11_SIN865_ ------N------------------S-Y----P-F#--------
HCM275-F05_SIN867_ ------N------------------S-YS---A-F#--------
HCM300-H06_SIN869_ ------N------------------V-Y----Y-A#--------
HCM274-B07_SIN871_ ------N--------------------G----G-L#--------
HCM269-A07_SIN873_ ------N--------------------R----P-W#--------
HCM269-H04_SIN875_ ------N--------------------S----G-F#--------
HCM306-H02_SIN877_ ------N--------------------S----G-L#--------
HCM299-C09_SIN879_ ------N-------------------------A-F#--------
HCM274-D06_SIN881_ ------N-------------------------M--#--------
HCM303-C12_SIN883_ ------N-S----------------V-Y----Y-S#--------
HCM273-D11_SIN885_ ------N-Y-I----------------S----G--#--------
HCM268-G04_SIN887_ ------P-A------------------SS---G-F#--------
HCM299-D01_SIN889_ ------P-D----------------V-S----A-F#--------
HCM303-G04_SIN891_ ------P-D----------------V-S----Y-G#--------
HCM271-C05_SIN893_ ------P-D----------------V-SS---F-D#--------
HCM271-F04_SIN895_ ------P-M-F--------------S-SS---G-F#--------
HCM275-E05_SIN897_ ------P-M-I--------------S-SS---Y-G#--------
HCM269-H12_SIN899_ ------P-M-S--------------S-YS---A-F#--------
HCM270-C02_SIN901_ ------P-M----------------S-SS---G-F#--------
HCM272-F09_SIN903_ ------P-N----------------V-Y----A-F#--------
HCM275-F04_SIN905_ ------P---F--------------S-S----A--#--------
HCM305-G11_SIN907_ ------P---I----------------GS---Y-S#--------
HCM269-C10_SIN909_ ------P---I----------------S----F-D#--------
HCM277-A04_SIN911_ ------P---I----------------S----G-F#--------
HCM274-G05_SIN913_ ------P---I----------------SS---G--#--------
HCM271-F10_SIN915_ ------P---I----------------SS---Y-D#--------
HCM301-E12_SIN917_ ------P--------------------S----W-D#--------
HCM271-C03_SIN919_ ------P-------------------------K-F#--------
HCM274-C08_SIN921_ --------A-I----------------S----Y-G#--------
HCM274-G04_SIN923_ --------D-I----------------GS---S-I#--------
HCM274-B05_SIN925_ --------D---F------------V-S----H-S#--------
HCM270-D11_SIN927_ --------D----------------V-SS---A-W#--------
HCM276-A01_SIN929_ --------D----------------V-Y----P-F#--------
HCM269-F11_SIN931_ --------D----------------V-Y----T-F#--------
HCM276-B07_SIN933_ --------D----------------V-Y----Y-D#--------
HCM275-D03_SIN935_ --------D----------------V-Y---#T-F#--------
HCM268-F07_SIN937_ --------D-----------------------F-D#--------
HCM268-H01_SIN939_ --------G------------------Y----G--#--------
HCM271-B11_SIN941_ --------M-I---------------------T-G#--------
HCM270-H12_SIN943_ ----------F---------------------Y-S#--------
HCM273-C06_SIN945_ ----------I---------------------W-S#--------
HCM277-F05_SIN947_ ----------M----------------Y----A--#--------
HCM273-C12_SIN949_ ----------M----------------Y----G--#--------
HCM275-F11_SIN951_ -------------------------S-S----A--#--------
HCM268-C02_SIN953_ -------------------------S-Y----G-F#--------
HCM269-D01_SIN955_ -------------------------S-YS---A--#--------
HCM270-C06_SIN957_ -------------------------V-Y----F-S#--------
HCM270-D09_SIN959_ -------------------------V-Y----Y-G#--------
HCM275-F07_SIN961_ --------Q----------------V-Y----A--#--------
HCM277-D10_SIN963_ --------S-I---------------------Y-S#--------
HCM275-E02_SIN965_ --------S----------------S------A-F#--------
HCM274-H10_SIN967_ --------S----------------V-YS---A-F#--------
HCM271-C06_SIN969_ --------S----------------V-YS--SA-F#--------
HCM272-C06_SIN971_ --------W----------------V-SS---G--#--------
HCM274-C02_SIN973_ --------W----------------V------K-F#--------
HCM274-G01_SIN975_ ------R-A-I----------------S----F-D#--------
HCM268-F12_SIN977_ ------R-A-M----------------S----F-D#--------
HCM268-F11_SIN979_ ------R-A----------------S-Y----G-F#--------
HCM299-E06_SIN981_ ------R-A-----------------------Y-D#--------
HCM273-B12_SIN983_ ------R-D-F--------------S-S----G--#--------
HCM298-A04_SIN985_ ------R-D----------------S-SS---F-G#--------
HCM273-A11_SIN987_ ------R-D----------------V-S----A-F#--------
HCM269-A05_SIN989_ ------R-D----------------V-Y----H-M#--------
HCM270-C05_SIN991_ ------R-D----------------W-S----G-Q#--------
HCM269-F05_SIN993_ ------R-D-----------------------F-S#--------
HCM277-H07_SIN995_ ------R-H------------------S----S-L#--------
HCM275-A06_SIN997_ ------R-M-I--------------G-Y----W-D#--------
HCM268-B10_SIN999_ ------R-N----------------V-Y----A--#--------
HCM270-H03_SIN1001 ------R---F----------------S----Y-S#--------
HCM276-A02_SIN1003 ------R---F---------------------Y-D#--------
HCM304-C09_SIN1005 ------R---I----------------Y----G--#--------
HCM271-B05_SIN1007 ------R---V----------------S----Y-G#--------
HCM270-C04_SIN1009 ------R------------------S-SS---G--#--------
HCM268-G08_SIN1011 ------R------------------S-Y----A-F#--------
HCM269-E08_SIN1013 ------R------------------V-Y----A--#--------
HCM276-F02_SIN1015 ------R------------------V-Y---T-F#--------
HCM276-A10_SIN1017 ------R------------------V-YS---Y-G#--------
HCM304-D03_SIN1019 ------R--------------------GS---G-F#--------
HCM271-D11_SIN1021 ------R--------------------S----G-L#--------
HCM272-A08_SIN1023 ------R--------------------S----M-S#--------
HCM269-B07_SIN1025 ------R--------------------SS---G-F#--------
HCM271-G08_SIN1027 ------R--------------------SS---G-L#--------
HCM271-A02_SIN1029 ------R-------------------------A--#--------
HCM273-G11_SIN1031 ------R-------------------------F-D#--H-----
HCM299-B04_SIN1033 ------R-------------------------T--#--------
HCM275-E08_SIN1035 ------R--------------------Y----A-F#--------
HCM275-B08_SIN1037 ------R--------------------YS---K-F#--------
HCM277-G09_SIN1039 ------R-S----------------S-Y----A-F#--------
HCM271-E01_SIN1041 ------R-S----------------V-Y----Y-G#--------
HCM275-F09_SIN1043 ------R-W----------------V------A-F#--------
HCM269-D08_SIN1045 ------R-Y-M----------------S----A--#--------
HCM277-C12_SIN1047 ------S-D-I--------------W-G----S-M#--------
HCM274-F12_SIN1049 ------S-D----------------S-SS-V-A--#--------
HCM269-G01_SIN1051 ------S-D----------------V-G----G-F#--------
HCM269-F04_SIN1053 ------S-D----------------V-S----Y-G#--------
HCM269-E01_SIN1055 ------S-D----------------V-Y-------#--------
HCM269-G07_SIN1057 ------S-D----------------V-YS---F-G#--------
HCM268-C01_SIN1059 ------S-D----------------V-YS---T-F#--------
HCM268-D06_SIN1061 ------S-D----------------V-YS---Y-G#--------
HCM272-G07_SIN1063 ------S-E----------------V-YS---A-F#--------
HCM303-F07_SIN1065 ------S-E------------------SS---G--#--------
HCM275-B02_SIN1067 ------S-M-I--------------S-S----G--#--------
HCM269-C01_SIN1069 ------S-M-I--------------S-S----W-S#--------
HCM268-H04_SIN1071 ------S-M-I--------------S-Y----Y-S#--------
HCM277-H08_SIN1073 ------S-N----------------S-S----G--#--------
HCM274-B02_SIN1075 ------S---I----------------SS---F-D#--------
HCM268-E03_SIN1077 ------S---M----------------YS---G-F#--------
HCM302-G11_SIN1079 ------S------------------S-S----G--#--------
HCM270-G08_SIN1081 ------S------------------S-S---#M--#--------
HCM268-E08_SIN1083 ------S------------------S-Y----G-F#--------
HCM270-E05_SIN1085 ------S--------------------SS---G--#--------
HCM271-A01_SIN1087 ------S-------------------------A-F#--------
HCM270-C03_SIN1089 ------S-------------------------S-L#--------
HCM275-A09_SIN1091 ------S-------------------------Y--#--------
HCM298-D08_SIN1093 ------S-Q----------------S-Y----A-F#--------
HCM274-A09_SIN1095 ------S-S----------------V-YS---Y-G#--------
HCM269-E06_SIN1097 ------T-A-I----------------G----F-D#--------
HCM269-H06_SIN1099 ------T-A------------------S----G-F#--------
HCM276-E11_SIN1101 ------T-D-F--------------S-SS---A-F#--------
HCM271-E11_SIN1103 ------T-D-I----------------S----Y-G#--------
HCM270-A04_SIN1105 ------T-D-I----------------SS---F-D#--------
HCM268-F10_SIN1107 ------T-D----------------V-Y----P--#--------
HCM275-A02_SIN1109 ------T-D------------------SS---G-F#--------
HCM272-C08_SIN1111 ------T-E------------------SS---G-G#--------
HCM277-F06_SIN1113 ------T---F----------------S----Y-D#--------
HCM272-B07_SIN1115 ------T---I---------------------Y-G#--------
HCM276-E12_SIN1117 ------T---M----------------Y----A-F#--------
HCM299-D12_SIN1119 ------T------------------S-S----A--#--------
HCM273-F01_SIN1121 ------T------------------S------A--#--------
HCM271-C07_SIN1123 ------T------------------V-YS---Y-G#--------
HCM269-H10_SIN1125 ------T--------------------S----A-F#--------
HCM268-B07_SIN1127 ------T--------------------S----G-F#--------
HCM277-G07_SIN1129 ------T-------------------------Y-D#--------
HCM273-F06_SIN1131 ------T--------------------Y----G-F#--------
HCM274-E07_SIN1133 ------T-Q----------------S-YS---#-F#--------
HCM276-F04_SIN1135 ------T-S-I----------------S----F-D#--------
HCM270-A06_SIN1137 ------V-D-I----------------G----M-L#--------
HCM274-G08_SIN1139 ------V-D----------------V-Y----A--#--------
HCM274-D12_SIN1141 ------V-D----------------V-Y----Y-D#--------
HCM304-E10_SIN1143 ------V-D----------------V-YS---A-F#--------
HCM268-A02_SIN1145 ------V-D----------------V-YS---P-F#--------
HCM272-B06_SIN1147 ------V-D------------------S----F-D#--------
HCM268-D04_SIN1149 ------V-E------------------S----G-F#--------
HCM298-G07_SIN1151 ------V-N----------------S-S----G-F#--------
HCM276-E09_SIN1153 ------V------------------S-S----A--#--------
HCM269-B04_SIN1155 ------V------------------S-S----Y-G#--------
HCM299-D07_SIN1157 ------V------------------S-SSG-#A--#--------
HCM304-G02_SIN1159 ------V------------------W-S----G-F#--------
HCM268-D05_SIN1161 ------V------------------W-SS---G-A#--------
HCM275-G10_SIN1163 ------V-------------------------A--#--------
HCM276-G02_SIN1165 ------V--------------------Y----A--#--------
HCM274-D10_SIN1167 ------V-Q----------------V-Y----T-F#--------
HCM274-E12_SIN1169 ------V-W-I----------------S----G-F#--------
HCM301-A06_SIN1171 ------W-A----------------S-S----G--#--------
HCM268-F01_SIN1173 ------W-D-F--------------S-S----A-F#--------
HCM268-D08_SIN1175 ------W-D----------------V-Y----A--#--------
HCM268-B04_SIN1177 ------W-D----------------V-Y----F-D#--------
HCM270-B04_SIN1179 ------W-D----------------V-Y----Y-G#--------
HCM268-D07_SIN1181 ------W-D----------------V-YS---A-F#--------
HCM276-F11_SIN1183 ------W-D----------------V-YS---P-F#--------
HCM274-D03_SIN1185 ------W-E----------------W-S----G-Q#--------
HCM274-H06_SIN1187 ------W-E------------------S----G--#--------
HCM270-D07_SIN1189 ------W-N----------------V-Y----G-F#--------
HCM274-F11_SIN1191 ------W-N----------------S---F-D#--------
HCM275-B07_SIN1193 ------W---I----------------SS---Y-S#--------
HCM274-C07_SIN1195 ------W---T----------------S---Y-G#--------
HCM275-H02_SIN1197 ------W---V----------------Y----G-F#--------
HCM276-B06_SIN1199 ------W------------------S-S----A--#--------
HCM305-H03_SIN1201 ------W------------------S------A--#--------
HCM272-G03_SIN1203 ------W------------------V-Y----Y-S#--------
HCM268-G05_SIN1205 ------W------------------V-YS---A-F#--------
HCM303-H08_SIN1207 ------W------------------V-YS---Y-G#--------
HCM271-C10_SIN1209 ------W-------------------------A-F#--------
HCM274-B03_SIN1211 ------W----------------------------#--------
HCM277-B08_SIN1213 ------W-S----------------V-Y----G-F#--------
HCM273-D09_SIN1215 ------W-T----------------S-S----G--#--------
HCM273-C04_SIN1217 ------W-Y-I----------------S----G--#--------
HCM275-H04_SIN1219 ------Y-D-I--------------W-S----L-M#--------
HCM271-G11_SIN1221 ------Y-D-I---------------------Y-S#--------
HCM271-F08_SIN1223 ------Y-D-V----------------S----F-L#--------
HCM268-D01_SIN1225 ------Y-D----------------S-S----F-G#--------
HCM304-E11_SIN1227 ------Y-D----------------V-SS---G-F#--------
HCM301-B04_SIN1229 ------Y-D----------------V-Y----T-F#--------
HCM301-A09_SIN1231 ------Y-D----------------V-Y----Y-A#--------
HCM268-H12_SIN1233 ------Y-D------------------SS---G--#--------
HCM273-H09_SIN1235 ------Y-E------------------SS---F-S#--------
HCM303-A02_SIN1237 ------Y-G----------------V-S----G-F#--------
HCM273-G09_SIN1239 ------Y-M-I--------------G--S---F-M#--------
HCM274-A08_SIN1241 ------Y-M----------------S-SS---G-F#--------
HCM268-H06_SIN1243 ------Y-M----------------S-YS---A-F#--------
HCM273-F05_SIN1245 ------Y-N----------------S-S----G--#--------
HCM268-E02_SIN1247 ------Y---F----------------S----W-D#--------
HCM271-E09_SIN1249 ------Y---I--------------W-S----G-Q#--------
HCM275-G05_SIN1251 ------Y---V----------------W----#--#--------
HCM277-G02_SIN1253 ------Y------------------S------A-F#--------
HCM270-H05_SIN1255 ------Y------------------V-Y----A-F#--------
HCM273-A06_SIN1257 ------Y--------------------SS---G-H#--------
HCM276-F08_SIN1259 ------Y-------------------------A-F#--------
```

Non-standard position 58a is allowed so that isolates having insertions appear more nearly aligned.

TABLE 7
The VLs of M0237-D02 and M0275-D02 compared to germline

| | |
|---|---|
| | FR1.................... CDR1....... FR2............ |
| M0237-D02-LC | EIVLTQSPATLSLSPGERATLSC RASQSISSFLA WYQQKPGQAPRLLIY |
| L6 ::JK5 | EIVLTQSPATLSLSPGERATLSC RASQSVSSYLA WYQQKPGQAPRLLIY |
| M0237-D02-LC | ----------------------- -----I--F-- --------------- |
| | CDR2... FR3............................. CDR3..... |
| M0237-D02-LC | DASYRAT GIPARFSGSGSGTDFTLTISSLEPEDFAVYYC QQRGNWPIT |
| L6 ::JK5 | DASNRAT GIPARFSGSGSGTDFTLTISSLEPEDFAVYYC QQRSNWP |
| M0237-D02-LC | ---Y--- -------------------------------- ---G---IT |
| | FR4....... |
| M0237-D02-LC | FGQGTRLEIK SEQ ID NO: 1 |
| L6 ::JK5 | FGQGTRLEIK SEQ ID NO: 31 |
| M0237-D02-LC | ---------- |
| M0275-D03-LC | DIQMTQSPATLSLSPGERATLSC RASQSISSFLA WYQQKPGQAPRLLIY |
| L6 ::JK5 | EIVLTQSPATLSLSPGERATLSC RASQSVSSYLA WYQQKPGQAPRLLIY |
| M0275-D03-LC | D-QM------------------- -----I--F-- --------------- |
| M0275-D03-LC | DASYRAT GIPARFSGSGSGTDFTLTISSLEPEDYAVYYC QQRGNWPIT |
| L6 ::JK5 | DASNRAT GIPARFSGSGSGTDFTLTISSLEPEDFAVYYC QQRSNWP |
| M0275-D03-LC | ---Y--- --------------------------Y----- ---G---IT |
| M0275-D03-LC | FGQGTRLEIK SEQ ID NO: 3 |
| L6 ::JK5 | FGQGTRLEIK SEQ ID NO: 31 |
| M0275-D03-LC | ---------- |

### Example 11

### Inhibitory Activity of 19 Unique Fabs Selected from Affinity Maturation (LC+HCDR1-2-Prescreening) Against h/mMMP-2 and -9

[0652] 539A-M0256-G09, 539A-M0256-A04, 539A-M0256-D03, 539A-M0265-A07, 39A-M0263-F01, 539A-M0263-F05, 539A-M0256-C09, 539A-M0256-B03, 539A-M0265-A04, 539A-M0256-A07, 539A-M0264-A09, 539A-M0265-C07, 539A-M0256-D11, 539A-M0266-E02, 539A-M0256-E10, 539A-M0256-C07, 539A-M0266-D03, 539A-M0256-E03, 539A-M0237-D02 Fabs and 539A-M0237-D02 IgG1 were tested against hMMP-9, hMMP-2, mMMP-9 and mMMP-2.

[0653] Results are summarized in FIG. 6.

### Example 12

### Ki,app ([250M] (nM) of 539A-M0266-E02 Against Human MMP-9, Human MMP-2, Mouse MMP-9, and Mouse MMP-2

[0654] The method for the enzyme inhibition assay is described in Example 14. Results are summarized in FIG. 7.

### Example 13

### Cross-Reactivity Data for 539A-M0266-E02 Against Human MMP-1, -7, -8, 10 and -12

[0655] Results are summarized in FIG. 8.

### Example 14

### Ki,app ([25 μM] (Nm) of Affinity Matured Antibodies M0307-F04, M0276-F11, M0299-A12, M0275-E12, M0301-A09, M0256-D11, M0272-H08, M0274-G08, M0275-D03, M0273-A11, M0273-G07, M0273-B10, M0299-C09, M0273-C10, M0306-D04, and M0301-D12 Against Human MMP-9, Human MMP-2, Mouse MMP-9, and Mouse MMP-2

[0656] Enzyme Inhibition Assays

[0657] Human MMP-9 (Biomol #SE-244), mouse MMP-9 (R&D Systems #909-MM-010), human MMP-2 (Biomol #SE-237) and mouse MMP-2 (R&D Systems #924-MP-010) were tested at final concentrations of 1 nM, 0.25-0.4 nM, 2.5 nM and 0.2 nM, respectively. Target enzymes were incubated with inhibitor for two hours at 30° C. in reaction buffer (50 mM Tris-HCl pH 7.5, 150 mM NaCl, 5 mM CaCl₂, 0.05% Brij-35) in a total volume of 90 μL using a white 96 well plate (Costar). Reactions contained 5 μL of small-scale sFab stock solution (average concentration of 500 nM) for single point inhibition analysis or a concentration series of sFab/IgG for IC50 Ki,app determinations. Commercially available anti-MMP-9 antibodies (Millipore mAb 13415 and R&D Systems polyclonal IgG #AB911) were tested by IC50 analyses using 100 nM and 500 nM as the highest inhibitor concentrations, respectively. An anti-MMP-2 antibody (R&D Systems polyclonal IgG #AF902) was similarly tested with 200 nM as the highest inhibitor concentration. Reactions were initiated by the addition of 10 μL of a 10× concentrated stock of substrate, Mca-Lys-Pro-Leu-Gly-Leu-Dap(Dnp)-Ala-Arg-NH2, (Bachem M-2350), at final concentration of 10 μM and monitored at 30° C. in a Molecular Devices' Gemini fluorescence plate reader. The excitation and emission wavelengths were set at 328 nm and 393 nm, respectively. Kinetic data were acquired by the increase in fluorescence, and initial rates for each condition were plotted against the total inhibitor concentration. Reactions were performed in duplicates and all data replicates were plotted in a single graph and fit to the following equation¹:

$$A = {A}_{0} - {A}_{inh} ( \frac{( {K}_{i , app} + Inh + E ) - \sqrt{{( {K}_{i , app} + Inh + E )}^{2} - 4 \cdot DX 88 \cdot E}}{2 \cdot E} ) \qquad Eqn . 1$$

[0658] Where A=initial rate observed at each inhibitor concentration; Aₒ=initial rate observed in the absence of inhibitor; Aᵢₙₕ=initial rate observed for the enzyme inhibitor complex; Inh=concentration of inhibitor; E=total enzyme concentration (treated as a floated parameter); and K_{i,app}=apparent equilibrium inhibition constant.

[0659] The results of three commercially available anti-hMMP-9 or anti-hMMP-2 antibodies are shown in Table 9.

TABLE 9
Summary of affinities of three commercially available anti-hMMP-9 or
anti-hMMP-2 antibodies.

| | human | | human |
|---|---|---|---|
| | MMP-9 | | MMP-2 |
| | IC₅₀ (nM) | | Ki, app (nM) |
| Anti-hMMP-9 | >100 | nM | nd |
| Millipore mAb #13415 | | | |
| Anti-hMMP-9 | >500 | | nd |
| R&D Systems pAb # AB911 | | | |

| | | |
|---|---|---|
| Anti-hMMP-2 | nd | 6.0 |
| R&D Systems pAb # AF902 | | |

[0660] Results for antibodies M0307-F04, M0276-F11, M0299-A12, M0275-E12, M0301-A09, M0256-D11, M0272-H08, M0274-G08, M0275-D03, M0273-A11, M0273-G07, M0273-B10, M0299-C09, M0273-C10, M0306-D04, and M0301-D12 are summarized in Table 10.

TABLE 10

| | small-scale sFab | | | | medium-scale sFab | | | |
|---|---|---|---|---|---|---|---|---|
| | human | mouse | human | mouse | human | mouse | human | mouse |
| | MMP-9 | MMP-9 | MMP-2 | MMP-2 | MMP-9 | MMP-9 | MMP-2 | MMP-2 |
| Isolate | Ki, app | Ki, app | Ki, app | Ki, app | Ki, app | Ki, app | Ki, app | Ki, app |
| Mname | (nM) | (nM) | (nM) | (nM) | (nM) | (nM) | (nM) | (nM) |
| M0307-F04 | 0.1 | 0.1 | 0.1 | 2.2 | 0.8 | 0.4 | 0.4 | 2.2 |
| M0276-F11 | 0.2 | 0.4 | 0.2 | 3.7 | 0.4 | 0.6 | 0.4 | 3.7 |
| M0299-A12 | 0.2 | | 1.7 | 30 | 0.6 | | 1.7 | 30 |
| M0275-E12 | 0.3 | 1 | 0.9 | 15 | 0.4 | | 0.5 | 15 |
| M0301-A09 | 0.3 | | 0.5 | 21 | 0.5 | | 1 | 21 |
| M0256-D11 | 0.3 | | | 4.2 | 0.3 | 0.6 | 0.5 | 4.2 |
| M0272-H08 | 0.4 | | | 46 | | | | 46 |
| M0274-G08 | 0.6 | | | 2.7 | 0.5 | 0.6 | 0.4 | 2.7 |
| M0275-D03 | 0.6 | 1.2 | 0.7 | 5.4 | 0.6 | 1 | 0.5 | 5.4 |
| M0273-A11 | 0.6 | | | 32 | 0.8 | | 2.7 | 32 |
| M0273-G07 | 0.6 | | | 22 | 0.6 | | 1 | 22 |
| M0273-B10 | 0.7 | | | 59 | | | | 59 |
| M0299-C09 | 0.7 | | >5 | | | | | |
| M0273-C10 | 0.9 | | | 18 | 1 | | 2 | 18 |
| M0306-D04 | 0.9 | 2.8 | 1 | | | | | |
| M0301-D12 | 1 | | 1.2 | 25 | 1.7 | | >10 | 25 |

### Example 15

### Germlined, Optimized MMP-9/2 Specific Antibodies

[0661] Antibodies X0106-A01, X0106-B02, X0106-C04, X0106-E4, and X0106-F05 were produced as IgG1s and tested for inhibition of human and mouse MMP-9 and MMP-2. X0106-A01, X0106-B02, X0106-C03, X0106-E4, and X0106-F05 are the germlined, optimized version of M0256-D11, M0276-F11, M0274-G08, M0275-D03, and M0307-F04, respectively.

[0662] Table 11 gives the LV and HV CDR sequences of the germlined, optimized MMP-9/MMP-2 specific antibodis (X0106-A01, X0106-B02, X0106-C04, X0106-E4, and X0106-F05). Following Table 10 is a listing of the sequences of VL and VH plus part of the constant regions for these antibodies.

TABLE 11

CDRs of germlined, optimized hMMP2/hMMP9/mMMP2/mMMP9-inhibiting
Abs

| | | | | | | |
|---|---|---|---|---|---|---|
| Initial Name | LV-CDR1 | LV-CDR2 | LV-CDR3 | HV-CDR1 | HV-CDR2 | HV-CDR3 |

| | | | | | | |
|---|---|---|---|---|---|---|
| X0106-A01 | RASQSISSFLA | DASYRAT | QQRGNWPIT | HYDMW | VIYSSGGPTFYADSVKG | DRAYGDYVGWNGFDY |
| X0106-B02 | RASQSISSFLA | DASYRAT | QQRGNWPIT | WYDMW | VIYSSGGPTFYADSVKG | DRAYGDYVGWNGFDY |
| X0106-C03 | RASQSISSFLA | DASYRAT | QQRGNWPIT | VYDMW | VIYPSGGATYYADSVKG | DRAYGDYVGWNGFDY |
| X0106-E04 | RASQSISSFLA | DASYRAT | QQRGNWPIT | QYDMW | VIYPSGTTFYADSVKG | DRAYGDYVGWNGFDY |
| X0106-F05 | RASQSISSFLA | DASYRAT | QQRGNWPIT | LYDMW | VIYSSGGYTGYADSVKG | DRAYGDYVGWNGFDY |

VL and VH and Part of Constant Region for Fabs Germlined, Optimized for Binding to hMMP9, hMMP2, mMMP9, and mMMP2

X0106-A01-LC
SEQ ID NO: 43

EIVLTQSPATLSLSPGERATLSC RASQSISSFLA WYQQKPGQAPRLLIY DASYRAT
GIPARFSGSGSGTDFTLTISSLEPEDFAVYYC QQRGNWPIT FGQGTRLEIK
X0106-A01-HC

SEQ ID NO: 44
EVQLLESGGGLVQPGGSLRLSCAASGFTFS HYDMW WVRQAPGKGLEWVS VIYSSGGPTFYADSVKG
RFTISRDNSKNTLYLQMNSLRAEDTAVYYCAK DRAYGDYVGWNGFDY WGQGTLVTVSS
X0106-B02-LC
SEQ ID NO: 45
EIVLTQSPATLSLSPGERATLSC RASQSISSFLA WYQQKPGQAPRLLIY DASYRAT
GIPARFSGSGSGTDFTLTISSLEPEDFAVYYC QQRGNWPIT FGQGTRLEIK
X0106-B02-HC
SEQ ID NO: 46
EVQLLESGGGLVQPGGSLRLSCAASGFTFS WYDMW WVRQAPGKGLEWVS VIYSSGGPTFYADSVKG
RFTISRDNSKNTLYLQMNSLRAEDTAVYYCAK DRAYGDYVGWNGFDY WGQGTLVTVSS
X0106-C03-LC
SEQ ID NO: 47
EIVLTQSPATLSLSPGERATLSC RASQSISSFLA WYQQKPGQAPRLLIY DASYRAT
GIPARFSGSGSGTDFTLTISSLEPEDFAVYYC QQRGNWPIT FGQGTRLEIK
X0106-C03-HC
SEQ ID NO: 48
EVQLLESGGGLVQPGGSLRLSCAASGFTFS VYDMW WVRQAPGKGLEWVS VIYPSGGATYYADSVKG
RFTISRDNSKNTLYLQMNSLRAEDTAVYYCAK DRAYGDYVGWNGFDY WGQGTLVTVSS
X0106-E04-LC
SEQ ID NO: 49
EIVLTQSPATLSLSPGERATLSC RASQSISSFLA WYQQKPGQAPRLLIY DASYRAT
GIPARFSGSGSGTDFTLTISSLEPEDFAVYYC QQRGNWPIT FGQGTRLEIK
X0106-E04-HC
SEQ ID NO: 50
EVQLLESGGGLVQPGGSLRLSCAASGFTFS QYDMW WVRQAPGKGLEWVS VIYPSGTTFYADSVKG
RFTISRDNSKNTLYLQMNSLRAEDTAVYYCAK DRAYGDYVGWNGFDY WGQGTLVTVSS
X0106-F05-LC
SEQ ID NO: 51
EIVLTQSPATLSLSPGERATLSC RASQSISSFLA WYQQKPGQAPRLLIY DASYRAT
GIPARFSGSGSGTDFTLTISSLEPEDFAVYYC QQRGNWPIT FGQGTRLEIK
X0106-F05-HC
SEQ ID NO: 52
EVQLLESGGGLVQPGGSLRLSCAASGFTFS LYDMW WVRQAPGKGLEWVS VIYSSGGYTGYADSVKG
RFTISRDNSKNTLYLQMNSLRAEDTAVYYCAK DRAYGDYVGWNGFDY WGQGTLVTVSS

### Example 16

### Ki,app of M0237-D02 and Germlined, Optimized Derivatives

[0663] Results are summarized in Table 12.

TABLE 12

IgG

| | human | mouse | human | mouse |
|---|---|---|---|---|
| | MMP-9 | MMP-9 | MMP-2 | MMP-2 |
| Isolate | Ki, app | Ki, app | Ki, app | Ki, app |
| Mname | (nM) | (nM) | (nM) | (nM) |
| M0237-D02 | 0.92 | 1.3 | 17 | 76 |
| X0106-A01 | 0.1 | 0.25 | 0.34 | 4.7 |
| X0106-B02 | 0.08 | 0.24 | 0.31 | 4.2 |
| X0106-C03 | 0.14 | 0.22 | 0.42 | 3.2 |
| X0106-E04 | 0.13 | 0.23 | 0.38 | 3.9 |
| X0106-F05 | 0.15 | 0.1 | 0.30 | 3.0 |

### Example 17

### MMP-9 Specific Antibodies

[0664] When the light chain were shuffled, three antibodies that bind and inhibit human and mouse MMP-9, but do not inhibit human or mouse MMP-2, were selected. These are M0279-A03, M0279-B02, M0288-C08, and M0281-F06.

[0665] Table 13 gives the LV and HV CDR sequences of the MMP-9 specific antibodis (M0279-A03, M0279-B02, M0288-C08, and M0281-F06). Following Table 13 is a listing of the sequences of VL and VH plus part of the constant regions for these antibodies.

TABLE 13
CDRs of affinity matured hMMP9/mMMP9-inhibiting Abs

| | | | | | | |
|---|---|---|---|---|---|---|
| Initial Name | LV-CDR1 | LV-CDR2 | LV-CDR3 | HV-CDR1 | HV-CDR2 | HV-CDR3 |

| | | | | | | |
|---|---|---|---|---|---|---|
| M0279-A03 | KASHSISRNLA | GASTRAT | QQRRNWPVT | QYPMW | YIVPSGGRTYYADSVKG | DRAYGDYVGWNGFDY |
| M0279-B02 | RASQSVSSNLA | GASTRAT | QQRRNWPVT | QYPMW | YIVPSGGRTYYADSVKG | DRAYGDYVGWNGFDY |
| M0288-C08 | RASQSVSSYLA | GASTRVT | QQRSNWPVT | QYPMW | YIVPSGGRTYYADSVKG | DRAYGDYVGWNGFDY |
| M0281-F06 | RASQSVSSDLA | GASTRAT | QQRSNWPVT | QYPMW | YIVPSGGRTYYADSVKG | DRAYGDYVGWNGFDY |

VL and VH for Fabs Affinity Matured for Binding to hMMP9 and mMMP9

| M0279-A03-LC | |
|---|---|
| SEQ ID NO: 37 | |
| QDIQMTQSPATLSVSPGERVTLSC KASHSISRNLA WYQQKPGQAPRLLIF GASTRAT | |
| GIPARFSGSGSGTEFTLTISSLEAEDFAVYYC QQRRNWPVT FGPGTKLDFK | |
| M0279-A03-HC | |
| SEQ ID NO: 38 | |
| EVQLLESGGGLVQPGGSLRLSCAASGFTFS QYPMW WVRQAPGKGLEWVS YIVPSGGRTYYADSVKG | |
| RFTISRDNSKNTLYLQMNSLRAEDTAVYYCAK DRAYGDYVGWNGFDY WGQGTLVTVSS | |
| M0279-B02-LC | |
| SEQ ID NO: 39 | |
| QDIQMTQSPATLSVSPGERATLSC RASQSVSSNLA WYQQKPGQAPRLLIY GASTRAT | |
| GIPARFSGSGSGTEFTLTISSLQSEDFAVYYC QQRRNWPVT FGQGTRLEII | |
| M0279-B02-HC | |
| SEQ ID NO: 40 | |
| EVQLLESGGGLVQPGGSLRLSCAASGFTFS QYPMW WVRQAPGKGLEWVS YIVPSGGRTYYADSVKG | |
| RFTISRDNSKNTLYLQMNSLRAEDTAVYYCAK DRAYGDYVGWNGFDY WGQGTLVTVSS | |
| M0288-C08-LC | |
| SEQ ID NO: 41 | |
| QDIQMTQSPGTLSVSPGERVTLSC RASQSVSSYLA WYQQKPGQAPRLLIY GASTRVT | |
| GIPARFSGSGSGTEFTLTISSLQSEDFAVYYC QQRSSWPIT FGQGTRLEIK | |
| M0288-C08-HC | |
| SEQ ID NO: 42 | |
| EVQLLESGGGLVQPGGSLRLSCAASGFTFS QYPMW WVRQAPGKGLEWVS YIVPSGGRTYYADSVKG | |
| RFTISRDNSKNTLYLQMNSLRAEDTAVYYCAK DRAYGDYVGWNGFDY WGQGTLVTVSS | |
| LC for Fab M281-F06 | |
| (SEQ ID NO: 44) | |
| QDIQMTQSPA ALSLSPGERA TLSCRASQSV SSDLAWYQQK PGQAPRLLIY GASTRATGIP | 60 |
| ARFSGSRSGT AFTLTISSLE PEDFAVYYCQ QRSNWPVTFG QGTKLEIK | 108 |
| HC for Fab M281-F06 | |
| (SEQ ID NO: 45) | |
| EVQLLESGGG LVQPGGSLRL SCAASGFTFS QYPMWWVRQA PGKGLEWVSY IVPSGGRTYY | 60 |
| ADSVKGRFTI SRDNSKNTLY LQMNSLRAED TAVYYCAKDR AYGDYVGWNG FDYWGQGTLV | 120 |
| TVSS | 124 |

### Example 18

### Ki,app of Affinity Matured MMP-9 Specific Antibodies Against hMMP9, hMMP2, mMMP9, and mMMP2

[0666] Results are summarized in Table 14.

TABLE 14

| | small-scale sFab | | | | medium-scale sFab | | | | | |
|---|---|---|---|---|---|---|---|---|---|---|
| | human | mouse | human | mouse | human | mouse | human | | mouse | |
| | MMP-9 | MMP-9 | MMP-2 | MMP-2 | MMP-9 | MMP-9 | MMP-2 | | MMP-2 | |
| Isolate | Ki, app | Ki, app | Ki, app | Ki, app | Ki, app | Ki, app | Ki, app | | Ki, app | |
| Mname | (nM) | (nM) | (nM) | (nM) | (nM) | (nM) | (nM) | | (nM) | |
| M0279-A03 | 2.2 | | | | 1.6 | 24 | >430 | nM | >430 | nM |
| M0279-B02 | 2.6 | | | | 6.5 | 64 | >1 | μM | >1 | μM |
| M0288-C08 | 2.0 | | | | 1.8 | 13 | >1 | μM | >1 | μM |
| M0281-F06 | 0.8 | | | | 1.1 | 16 | >1 | μM | >1 | μM |

### Example 19

### Anti-MMP-9/-2 Inhibition Specificity

[0667] The anti-MMP-9/-2 antibodies were tested for their ability to inhibit the proteases listed in Table 15. The following MMPs were obtained commercially and tested at the specified final concentrations: MMP-1 (Biomol SE-180, 5 nM), MMP-3 (R&D Systems #513-MP, 5 nM), MMP-7 (Biomol SE-181, 5 nM), MMP-8 (Biomol SE-255, 5 nM), MMP-10 (Biomol SE-329, 5 nM), MMP-12 (Biomol SE-138, 5 nM), MMP-13 (Biomol SE-246, 2.5 nM), MMP-14 (Biomol SE-259, 5 nM), MMP-15 (Calbiochem #475938, 5 nM), MMP-16 (Calbiochem #475939, 1.25 nM) and MMP-24 (Calbiochem #PF117, 5 nM). MMP-26 was produced in-house (Dyax prep #020209) and tested at 2.2 μM. The metalloenzyme, TACE (R&D Systems, 5 nM), was also included in the analysis of antibody specificity. MMP activity was assayed in MMP Reaction Buffer using the M-2350 substrate (10 μM final concentration). MMP-3, MMP-26 and TACE were tested using Mca-RPKPVE-Nval-WRK(Dnp)-NH₂ (R&D Systems #ES002), Mca-PLA-Nva-Dap(Dnp)-AR-NH₂ (Bachem M-2520), and Mca-PLAQAV-Dpa-RSSSR-NH₂ (R&D systems # ES003), respectively, at 10 μM with excitation wavelengths at 328 nm and emission wavelengths at 393 nm. TACE was assayed in 25 mM Tris pH 7.5, 0.05% Brij 35. The activity of each MMP was assayed in the presence or absence of a fixed antibody concentration (1 μM for X106-A01 IgG, M279-B02, M281-F06 and M288-C08 sFabs; 500 nM for M279-A03 sFab) in duplicate reactions. Fabs or IgGs were incubated with each enzyme for 1 hour prior to the addition of substrate and observation of the enzymatic rate in a fluorescence plate reader (Molecular Devices Gemini). Significant inhibition of the MMPs was generally not observed and the IC₅₀ values in Table IV are estimated as being greater than the concentration of anti-MMP-9/-2 IgG or sFab in the assay. X106-A01 was observed to inhibit MMP-26 and MMP-7 with IC₅₀ values of 12 nM and 0.9 μM, respectively. The data from IC₅₀ determinations was fit to a 4-parameter logistic (equation 2).

$$A = \frac{{A}_{o}}{1 + {( \frac{I}{{IC}_{50}} )}^{s}} + Background \qquad Equation 2$$

### Where:

[0668] A=observed rate at each inhibitor concentration
Aₒ=rate of the uninhibited enzyme
I=concentration of inhibitor
IC₅₀=apparent equilibrium inhibition constant
s=slope factor
Background=observed rate of the fully bound enzyme inhibitor complex

TABLE 15
Cross-reactivity measurements for anti-MMP-9/-2 antibodies.

| | X106-A01 | | M279-B02 | M281-F06 | M288-C08 | M279-A03 |
|---|---|---|---|---|---|---|
| MMP-1 | >1 | μM | >1 μM | >1 μM | >1 μM | >500 nM |
| MMP-3 | >1 | μM | >1 μM | >1 μM | >1 μM | >500 nM |
| MMP-7 | 0.9 | μM | >1 μM | >1 μM | >1 μM | >500 nM |
| MMP-8 | >1 | μM | >1 μM | >1 μM | >1 μM | >500 nM |
| MMP-10 | >1 | μM | >1 μM | >1 μM | >1 μM | >500 nM |
| MMP-12 | >1 | μM | >1 μM | >1 μM | >1 μM | >500 nM |
| MMP-13 | >1 | μM | >1 μM | >1 μM | >1 μM | >500 nM |
| MMP-14 | >1 | μM | >1 μM | >1 μM | >1 μM | >500 nM |
| MMP-15 | >1 | μM | >1 μM | >1 μM | >1 μM | >500 nM |
| MMP-16 | >1 | μM | >1 μM | >1 μM | >1 μM | >500 nM |
| MMP-26 | 12 | nM | >1 μM | >1 μM | nd | nd |
| TACE | >1 | μM | >1 μM | >1 μM | >1 μM | >500 nM |

[0669] A number of embodiments of the invention have been described. Nevertheless, it will be understood that various modifications may be made without departing from the spirit and scope of the invention. Accordingly, other embodiments are within the scope of the following claims.

The application's sequence listing, which the Patent Office published only in electronic form, follows.

SEQUENCE LISTING (5619 sequences)

SEQ ID NO: 1 - protein, 58 aa, Artificial Sequence
  Description of Artificial Sequence: Synthetic polypeptide
MHSFCAFKAETGPCRARFDRWFFNIFTRQCEEFIYGGCEGNQNRFESLEECKKMCTRD

SEQ ID NO: 2 - DNA, 363 bp, Artificial Sequence
  Description of Artificial Sequence: Synthetic polynucleotide
ttctattctcacagtgcacaagacatccagatgacccagtctccagccaccctgtctttgtctccaggggaaagagccaccctctcctgcagggccagtcagagtattagcagcttcttagcctggtaccaacagaaacctggccaggctcccaggctcctcatctatgatgcatcgtatagggccactggcatcccagccaggttcagtggcagtgggtctgggacagacttcactctcaccatcagcagcctggagcctgaagattatgcagtttattactgtcagcagcgtggcaactggcctatcaccttcggccaagggacgcggctggagattaaacgaactgtggctgcaccatct

SEQ ID NO: 3 - protein, 121 aa, Artificial Sequence
  Description of Artificial Sequence: Synthetic polypeptide
FYSHSAQDIQMTQSPATLSLSPGERATLSCRASQSISSFLAWYQQKPGQAPRLLIYDASYRATGIPARFSGSGSGTDFTLTISSLEPEDYAVYYCQQRGNWPITFGQGTRLEIKRTVAAPS

SEQ ID NO: 4 - DNA, 486 bp, Artificial Sequence
  Description of Artificial Sequence: Synthetic polynucleotide
atgaagaagctcctctttgctatcccgctcgtcgttccttttgtggcccagccggccatggccgaagttcaattgttagagtctggtggcggtcttgttcagcctggtggttctttacgtctttcttgcgctgcttccggattcactttctctcagtaccctatgtggtgggttcgccaagctcctggtaaaggtttggagtgggtttcttatatcgttccttctggtggccgtacttattatgctgactccgttaaaggtcgcttcactatctctagagacaactctaagaatactctctacttgcagatgaacagcttaagggctgaggacacggccgtgtattactgtgcgaaagatcgggcctacggtgattacgtgggctggaacggttttgactactggggccagggcaccctggtcaccgtctcaagcgcctccaccaagggcccatcggtcttcccgctagcaccctcctccaagagc

SEQ ID NO: 5 - protein, 162 aa, Artificial Sequence
  Description of Artificial Sequence: Synthetic polypeptide
MKKLLFAIPLVVPFVAQPAMAEVQLLESGGGLVQPGGSLRLSCAASGFTFSQYPMWWVRQAPGKGLEWVSYIVPSGGRTYYADSVKGRFTISRDNSKNTLYLQMNSLRAEDTAVYYCAKDRAYGDYVGWNGFDYWGQGTLVTVSSASTKGPSVFPLAPSSKS

SEQ ID NO: 6 - protein, 108 aa, Artificial Sequence
  Description of Artificial Sequence: Synthetic polypeptide
QDIQMTQSPATLSLSPGERASLSCRASQNVARFLAWYQQKPGQAPRLLIYSASNRATGVPDRFSGSGSGTDFTLTISSLEPEDFAVYFCQQRGNWPITFGQGTRLEIK

SEQ ID NO: 7 - protein, 124 aa, Artificial Sequence
  Description of Artificial Sequence: Synthetic polypeptide
EVQLLESGGGLVQPGGSLRLSCAASGFTFSQYPMWWVRQAPGKGLEWVSYIVPSGGRTYYADSVKGRFTISRDNSKNTLYLQMNSLRAEDTAVYYCAKDRAYGDYVGWNGFDYWGQGTLVTVSS

SEQ ID NO: 8 - protein, 108 aa, Artificial Sequence
  Description of Artificial Sequence: Synthetic polypeptide
QDIQMTQSPATLSLSPGERATLSCRASQNVHTYLAWYQQKPGQAPRLLISEASNRATGVPARFTGSGSGIDFSLSISSLEPEDFAIYYCQQRGGWPITFGGGTKVEIK

SEQ ID NO: 9 - protein, 124 aa, Artificial Sequence; identical to SEQ ID NO: 7
  Description of Artificial Sequence: Synthetic polypeptide

SEQ ID NO: 10 - protein, 108 aa, Artificial Sequence
  Description of Artificial Sequence: Synthetic polypeptide
QDIQMTQSPATLSLSPGERATLSCRASQSISSFLAWYQQKPGQAPRLLIYDASYRATGIPARFSGSGSGTDFTLTISSLEPEDYAVYYCQQRGNWPITFGQGTRLEIK

SEQ ID NO: 11 - protein, 124 aa, Artificial Sequence
  Description of Artificial Sequence: Synthetic polypeptide
EVQLLESGGGLVQPGGSLRLSCAASGFTFSVYPMIWVRQAPGKGLEWVSYISPSGGFTGYADSVKGRFTISRDNSKNTLYLQMNSLRAEDTAVYYCAKDRAYGDYVGWNGFDYWGQGTLVTVSS

SEQ ID NO: 12 - protein, 108 aa, Artificial Sequence; identical to SEQ ID NO: 10
  Description of Artificial Sequence: Synthetic polypeptide

SEQ ID NO: 13 - protein, 124 aa, Artificial Sequence
  Description of Artificial Sequence: Synthetic polypeptide
EVQLLESGGGLVQPGGSLRLSCAASGFTFSDYPMWWVRQAPGKGLEWVSVIYPSGGATFYADSVKGRFTISRDNSKNTLYLQMNSLRAEDTAVYYCAKDRAYGDYVGWNGFDYWGQGTLVTVSS

SEQ ID NO: 14 - protein, 108 aa, Artificial Sequence; identical to SEQ ID NO: 10
  Description of Artificial Sequence: Synthetic polypeptide

SEQ ID NO: 15 - protein, 124 aa, Artificial Sequence
  Description of Artificial Sequence: Synthetic polypeptide
EVQLLESGGGLVQPGGSLRLSCAASGFTFSTYPMIWVRQAPGKGLEWVSYISPSGGYTGYADSVKGRFTISRDNSKNTLYLQMNSLRAEDTAVYYCAKDRAYGDYVGWNGFDYWGQGTLVTVSS

SEQ ID NO: 16 - protein, 108 aa, Artificial Sequence; identical to SEQ ID NO: 10
  Description of Artificial Sequence: Synthetic polypeptide

SEQ ID NO: 17 - protein, 124 aa, Artificial Sequence
  Description of Artificial Sequence: Synthetic polypeptide
EVQLLESGGGLVQPGGSLRLSCAASGFTFSHYDMWWVRQAPGKGLEWVSVIYSSGGPTFYADSVKGRFTISRDNSKNTLYLQMNSLRAEDTAVYYCAKDRAYGDYVGWNGFDYWGQGTLVTVSS

SEQ ID NO: 18 - protein, 108 aa, Artificial Sequence; identical to SEQ ID NO: 10
  Description of Artificial Sequence: Synthetic polypeptide

SEQ ID NO: 19 - protein, 124 aa, Artificial Sequence
  Description of Artificial Sequence: Synthetic polypeptide
EVQLLESGGGLVQPGGSLRLSCAASGFTFSHYPMWWVRQAPGKGLEWVSSISPSGGATYYADSVKGRFTISRDNSKNTLYLQMNSLRAEDTAVYYCAKDRAYGDYVGWNGFDYWGQGTLVTVSS

SEQ ID NO: 20 - protein, 108 aa, Artificial Sequence; identical to SEQ ID NO: 10
  Description of Artificial Sequence: Synthetic polypeptide

SEQ ID NO: 21 - protein, 124 aa, Artificial Sequence
  Description of Artificial Sequence: Synthetic polypeptide
EVQLLESGGGLVQPGGSLRLSCAASGFTFSKYPMWWVRQAPGKGLEWVSSIYPSGGATFYADSVKGRFTISRDNSKNTLYLQMNSLRAEDTAVYYCAKDRAYGDYVGWNGFDYWGQGTLVTVSS

SEQ ID NO: 22 - protein, 108 aa, Artificial Sequence; identical to SEQ ID NO: 10
  Description of Artificial Sequence: Synthetic polypeptide

SEQ ID NO: 23 - protein, 124 aa, Artificial Sequence
  Description of Artificial Sequence: Synthetic polypeptide
EVQLLESGGGLVQPGGSLRLSCAASGFTFSHYDMLWVRQAPGKGLEWVSYISSSGGYTGYADSVKGRFTISRDNSKNTLYLQMNSLRAEDTAVYYCAKDRAYGDYVGWNGFDYWGQGTLVTVSS

SEQ ID NO: 24 - protein, 108 aa, Artificial Sequence; identical to SEQ ID NO: 10
  Description of Artificial Sequence: Synthetic polypeptide

SEQ ID NO: 25 - protein, 124 aa, Artificial Sequence
  Description of Artificial Sequence: Synthetic polypeptide
EVQLLESGGGLVQPGGSLRLSCAASGFTFSKYPMWWVRQAPGKGLEWVSYISSSGGGTFYADSVKGRFTISRDNSKNTLYLQMNSLRAEDTAVYYCAKDRAYGDYVGWNGFDYWGQGTLVTVSS

SEQ ID NO: 26 - protein, 108 aa, Artificial Sequence; identical to SEQ ID NO: 10
  Description of Artificial Sequence: Synthetic polypeptide

SEQ ID NO: 27 - protein, 124 aa, Artificial Sequence
  Description of Artificial Sequence: Synthetic polypeptide
EVQLLESGGGLVQPGGSLRLSCAASGFTFSLYDMWWVRQAPGKGLEWVSYISSSGGATFYADSVKGRFTISRDNSKNTLYLQMNSLRAEDTAVYYCAKDRAYGDYVGWNGFDYWGQGTLVTVSS

SEQ ID NO: 28 - protein, 108 aa, Artificial Sequence; identical to SEQ ID NO: 10
  Description of Artificial Sequence: Synthetic polypeptide

SEQ ID NO: 29 - protein, 124 aa, Artificial Sequence
  Description of Artificial Sequence: Synthetic polypeptide
EVQLLESGGGLVQPGGSLRLSCAASGFTFSRYPMWWVRQAPGKGLEWVSYISPSGGFTSYADSVKGRFTISRDNSKNTLYLQMNSLRAEDTAVYYCAKDRAYGDYVGWNGFDYWGQGTLVTVSS

SEQ ID NO: 30 - protein, 108 aa, Artificial Sequence
  Description of Artificial Sequence: Synthetic polypeptide
QDIQMTQSPATLSLSPGETAILSCRASQSVGRFLAWYQQKPGQAPRLLIYGASSRATGIPDRFSGSGSGTDFSLTISRLEPEDFAVYYCQQRGNWPITFGQGTRLEIK

SEQ ID NO: 31 - protein, 124 aa, Artificial Sequence; identical to SEQ ID NO: 7
  Description of Artificial Sequence: Synthetic polypeptide

SEQ ID NO: 32 - protein, 108 aa, Artificial Sequence
  Description of Artificial Sequence: Synthetic polypeptide
QDIQMTQSPATLSVSPGERATLSCRASQNIGSDLAWYQHKPGQGPRLLIYGASSRATGIPDRFSGSGSGTDFTLTISSLEPEDFAVYFCQQRGNWPITFGQGTRLEIK

SEQ ID NO: 33 - protein, 124 aa, Artificial Sequence; identical to SEQ ID NO: 7
  Description of Artificial Sequence: Synthetic polypeptide

SEQ ID NO: 34 - protein, 108 aa, Artificial Sequence
  Description of Artificial Sequence: Synthetic polypeptide
QDIQMTQSPGTLSLSPGERATLSCRASQSVGNFLAWYQQKPGQAPRLLIYGASNRATGIPDRFSGSGSGTDFTLTISRLEPEDFAVYFCQQRGNWPITFGQGTRLEIK

SEQ ID NO: 35 - protein, 124 aa, Artificial Sequence; identical to SEQ ID NO: 7
  Description of Artificial Sequence: Synthetic polypeptide

SEQ ID NO: 36 - protein, 108 aa, Artificial Sequence
  Description of Artificial Sequence: Synthetic polypeptide
QDIQMTQSPSSVSASTGDRVIISCRASQVIFSGLAWYQQKPGKAPKLLISAASNLQSGVPARFSGSGSGTYFTLTISSLQPEDFATYYCQQAQTFPFTFGPGTKVDVQ

SEQ ID NO: 37 - protein, 124 aa, Artificial Sequence; identical to SEQ ID NO: 7
  Description of Artificial Sequence: Synthetic polypeptide

SEQ ID NO: 38 - protein, 108 aa, Artificial Sequence
  Description of Artificial Sequence: Synthetic polypeptide
QDIQMTQSPSSVSASVGDRVTITCRASQNIGRWLAWYQQKPGQAPNLLIYGASSLQTGVPSRFSGSGSGTDFSLTISSLQPEDFAVYYCQQRRKWPVTFGGGTKVEIK

SEQ ID NO: 39 - protein, 124 aa, Artificial Sequence; identical to SEQ ID NO: 7
  Description of Artificial Sequence: Synthetic polypeptide

SEQ ID NO: 40 - protein, 108 aa, Artificial Sequence
  Description of Artificial Sequence: Synthetic polypeptide
QDIQMTQSPVTLSVSPGERATLSCRASQNIGSDLAWYQQQPGQAPRLLIYRASFRATGIPARFSGSGSGTDFTLTISSLQSEDFAVYYCQQRGNWPPTFGGGTKVEIR

SEQ ID NO: 41 - protein, 124 aa, Artificial Sequence; identical to SEQ ID NO: 7
  Description of Artificial Sequence: Synthetic polypeptide

SEQ ID NO: 42 - protein, 108 aa, Artificial Sequence
  Description of Artificial Sequence: Synthetic polypeptide
QDIQMTQFPATLSLSPGERATLSCRASQSISSFLAWYQQKPGQAPRLLIYDASYRATGIPARFSGSGSGTDFTLTISSLEPEDYAVYYCQQRGNWPITFGQGTRLEIK

SEQ ID NO: 43 - protein, 124 aa, Artificial Sequence; identical to SEQ ID NO: 7
  Description of Artificial Sequence: Synthetic polypeptide

SEQ ID NO: 44-45 - skipped (2 entries)

SEQ ID NO: 46 - protein, 108 aa, Artificial Sequence
  Description of Artificial Sequence: Synthetic polypeptide
QDIQMTQSPAFLSASLGDRVTITCRATQGIGTFLAWYQQKAGRAPKLLIYGASTLQSGVPSRFSGSGSGTEFTLTISSLQPEDFATYYCQQRYTWPITFGQGTRLEIR

SEQ ID NO: 47 - protein, 124 aa, Artificial Sequence; identical to SEQ ID NO: 7
  Description of Artificial Sequence: Synthetic polypeptide

SEQ ID NO: 48 - protein, 108 aa, Artificial Sequence
  Description of Artificial Sequence: Synthetic polypeptide
QDIQMTQSPATLPVSPGETVTLSCTASQSVGSHLAWYQQRPNQAPRLLIYDTSSRATGIPARFSGSGSGTDFTLTITSLEPEDFAVYYCQQRRSWPLTFGGGTKVEIK

SEQ ID NO: 49 - protein, 124 aa, Artificial Sequence; identical to SEQ ID NO: 7
  Description of Artificial Sequence: Synthetic polypeptide

SEQ ID NO: 50 - protein, 108 aa, Artificial Sequence
  Description of Artificial Sequence: Synthetic polypeptide
QDIQMTQSPATLSASPGERATLSCRASQSVSSDLAWYQQKPGQAPRLLIYGASTRATGIPARFSGSGSGTEFTLTISSLEPEDFALYYCQQRAYWPVSFGGGTKVEIK

SEQ ID NO: 51 - protein, 124 aa, Artificial Sequence; identical to SEQ ID NO: 7
  Description of Artificial Sequence: Synthetic polypeptide

SEQ ID NO: 52 - protein, 108 aa, Artificial Sequence
  Description of Artificial Sequence: Synthetic polypeptide
QDIQMTQSPATLSFSAGERATLSCRASQHIYTSLAWYQHKAGQAPRLLIYEASYRATGIPARFSGSGSGRDFTLTISSLEPEDVAVYYCQQRGSWPITFGQGTRLEIK

SEQ ID NO: 53 - protein, 124 aa, Artificial Sequence; identical to SEQ ID NO: 7
  Description of Artificial Sequence: Synthetic polypeptide

SEQ ID NO: 54 - protein, 108 aa, Artificial Sequence
  Description of Artificial Sequence: Synthetic polypeptide
QDIQMTQSPATLSLSAGERATLSCRASQSVSSYLAWYQQKPGQAPRLLIYGASTRATGIPARFSGGGSGTEFTLTISSLEPEDFAVYFCQQRGFWPITFGQGTRLEIK

SEQ ID NO: 55 - protein, 124 aa, Artificial Sequence; identical to SEQ ID NO: 7
  Description of Artificial Sequence: Synthetic polypeptide

SEQ ID NO: 56 - protein, 108 aa, Artificial Sequence
  Description of Artificial Sequence: Synthetic polypeptide
QDIQMTQSPATLSLSPGDRATLSCRASQSVSSYLAWYQQKPGQAPRLLIYGASNRATGIPARFSGSGSGTDFTLTISSLEPEDYAVYYCQQRGNWPITFGQGTRLEIK

SEQ ID NO: 57 - protein, 124 aa, Artificial Sequence; identical to SEQ ID NO: 7
  Description of Artificial Sequence: Synthetic polypeptide

SEQ ID NO: 58 - protein, 107 aa, Artificial Sequence
  Description of Artificial Sequence: Synthetic polypeptide
QDIQMTQSPATLSLSPGDWATLSCRASQSVSSVAWYQQKPGQAPRLLIYDTSNRATGIPDRFSGSGSGTDFTLTISRLEPEDFAVYYCQQRTKWPITFGQGTRLEIK

SEQ ID NO: 59 - protein, 124 aa, Artificial Sequence; identical to SEQ ID NO: 7
  Description of Artificial Sequence: Synthetic polypeptide

SEQ ID NO: 60 - protein, 108 aa, Artificial Sequence
  Description of Artificial Sequence: Synthetic polypeptide
QDIQMTQSPATLSLSPGEGATLSCRASESVGMYIAWYQQKPGQAPRLLMYGASNRATGIPARFRGSGSGTDFTLTISSLEPEDFAVYYCQQRGNWPITFGQGTRLEIK

SEQ ID NO: 61 - protein, 124 aa, Artificial Sequence; identical to SEQ ID NO: 7
  Description of Artificial Sequence: Synthetic polypeptide

SEQ ID NO: 62 - protein, 109 aa, Artificial Sequence
  Description of Artificial Sequence: Synthetic polypeptide
QDIQMTQSPATLSLSPGERATLSCGASQSVSSSYLAWYQQKPGLAPRLLIYDASSRATGIPDRFSGSGSGTDFTLTISRLEPEDFAVYYCQQYGSSPWTFGPGTTLDFN

SEQ ID NO: 63 - protein, 124 aa, Artificial Sequence; identical to SEQ ID NO: 7
  Description of Artificial Sequence: Synthetic polypeptide

SEQ ID NO: 64 - protein, 108 aa, Artificial Sequence
  Description of Artificial Sequence: Synthetic polypeptide
QDIQMTQSPATLSLSPGERATLSCRASPSISNFLAWYQQRPGQAPRLLIYGASNRATGVPARFSGSGSGTDFNLTISSVEPEDFAVYYCQQRRSWPPTFGQGTKLETK

SEQ ID NO: 65 - protein, 124 aa, Artificial Sequence; identical to SEQ ID NO: 7
  Description of Artificial Sequence: Synthetic polypeptide

SEQ ID NO: 66 - protein, 108 aa, Artificial Sequence
  Description of Artificial Sequence: Synthetic polypeptide
QDIQMTQSPATLSLSPGERATLSCRASQNIGGYLAWYQQKPGQAPRLLIYGASNRATGVPARFSGSGSGTDFSLIISSLETEDFAVYYCQQRSNWPPTFGGGTKVEIK

SEQ ID NO: 67 - protein, 124 aa, Artificial Sequence; identical to SEQ ID NO: 7
  Description of Artificial Sequence: Synthetic polypeptide

SEQ ID NO: 68 - protein, 109 aa, Artificial Sequence
  Description of Artificial Sequence: Synthetic polypeptide
QDIQMTQSPATLSLSPGERATLSCRASQNVANYLDWYQQKPGQAPRLLIYDGSNRATGVPDRFRGSGSETDFTLIISSLEPEDFAVYYCQQRHSWPPITFGQGTRLQIK

SEQ ID NO: 69 - protein, 124 aa, Artificial Sequence; identical to SEQ ID NO: 7
  Description of Artificial Sequence: Synthetic polypeptide

SEQ ID NO: 70 - protein, 108 aa, Artificial Sequence
  Description of Artificial Sequence: Synthetic polypeptide
QDIQMTQSPATLSLSPGERATLSCRASQNVHTYLAWYQQKPGQAPRLLISEASNRATGVPARFTGSGSGTDFTLSISSLEPEDFAIYYCQQRGGWPITFGGGTKVEIK

SEQ ID NO: 71 - protein, 124 aa, Artificial Sequence; identical to SEQ ID NO: 7
  Description of Artificial Sequence: Synthetic polypeptide

SEQ ID NO: 72 - protein, 108 aa, Artificial Sequence
  Description of Artificial Sequence: Synthetic polypeptide
QDIQMTQSPATLSLSPGERATLSCRASQSIGNHLAWYQQKSGQAPRLLIYDASNRATGIPARFSGGGSGTDFTLTISSLEPEDFAVYFCQQRGNWPITFGQGTRLEIK

SEQ ID NO: 73 - protein, 124 aa, Artificial Sequence; identical to SEQ ID NO: 7
  Description of Artificial Sequence: Synthetic polypeptide

SEQ ID NO: 74 - protein, 108 aa, Artificial Sequence
  Description of Artificial Sequence: Synthetic polypeptide
QDIQMTQSPATLSLSPGERATLSCRASQSISSFLAWYQQKPGQAPRLLIYDASYRATGIPARFSGSGSGTDFTLTISSLEPEDYAVYYCQQRGNWPITFGQGTKVEIK

SEQ ID NO: 75 - protein, 124 aa, Artificial Sequence; identical to SEQ ID NO: 7
  Description of Artificial Sequence: Synthetic polypeptide

SEQ ID NO: 76 - protein, 108 aa, Artificial Sequence
  Description of Artificial Sequence: Synthetic polypeptide
QDIQMTQSPATLSLSPGERATLSCRASQSISSFLAWYQQKPGQAPRLLIYGASSRARGTPDRFSGSGSGTDFTLTISSLEPEDYAVYYCQQRGNWPITFGQGTRLEIK

SEQ ID NO: 77 - protein, 124 aa, Artificial Sequence; identical to SEQ ID NO: 7
  Description of Artificial Sequence: Synthetic polypeptide

SEQ ID NO: 78 - protein, 108 aa, Artificial Sequence
  Description of Artificial Sequence: Synthetic polypeptide
QDIQMTQSPATLSLSPGERATLSCRASQSISSFLAWYQQKPGQAPRLLIYGASTRATGIPARFSGSGSGTDFTLTISSLEPEDYAVYYCQQRGNWPITFGQGTRLEIK

SEQ ID NO: 79 - protein, 124 aa, Artificial Sequence; identical to SEQ ID NO: 7
  Description of Artificial Sequence: Synthetic polypeptide

SEQ ID NO: 80 - protein, 108 aa, Artificial Sequence
  Description of Artificial Sequence: Synthetic polypeptide
QDIQMTQSPATLSLSPGERATLSCRASQSISSHLAWYQQKPGQAPRLVISGASSRATGIPDRFSGSGSGTDFTLTISRLEPEDYAVYYCQQRGNWPITFGQGTRLEIK

SEQ ID NO: 81 - protein, 124 aa, Artificial Sequence; identical to SEQ ID NO: 7
  Description of Artificial Sequence: Synthetic polypeptide

SEQ ID NO: 82 - protein, 108 aa, Artificial Sequence
  Description of Artificial Sequence: Synthetic polypeptide
QDIQMTQSPATLSLSPGERATLSCRASQSISTSLAWYQQKPGQAPRLLIYDASNRAAVIPARFSGSGSGTDFTLTISNLEPEDSAVYYCQQRGAWPLTFGGGTKVEIK

SEQ ID NO: 83 - protein, 124 aa, Artificial Sequence; identical to SEQ ID NO: 7
  Description of Artificial Sequence: Synthetic polypeptide

SEQ ID NO: 84 - protein, 109 aa, Artificial Sequence
  Description of Artificial Sequence: Synthetic polypeptide
QDIQMTQSPATLSLSPGERATLSCRASQSLGRSDLAWYQQKPGQAPRLLIFGVSNRVTGTPDRFSGSGSGTDFSLTISSLEPEDFAVYYCQQRSNWPPTFGGGTKLEIK

SEQ ID NO: 85 - protein, 124 aa, Artificial Sequence; identical to SEQ ID NO: 7
  Description of Artificial Sequence: Synthetic polypeptide

SEQ ID NO: 86 - protein, 109 aa, Artificial Sequence
  Description of Artificial Sequence: Synthetic polypeptide
QDIQMTQSPATLSLSPGERATLSCRASQSLGRSDLAWYQQKPGQAPRLLIFGVSNRVTGTPDRFSGSGSGTDFTLTIGSLEPEDFAVYYCQQRSTWPITFGQGTRLEIK

SEQ ID NO: 87 - protein, 124 aa, Artificial Sequence; identical to SEQ ID NO: 7
  Description of Artificial Sequence: Synthetic polypeptide

SEQ ID NO: 88 - protein, 108 aa, Artificial Sequence
  Description of Artificial Sequence: Synthetic polypeptide
QDIQMTQSPATLSLSPGERATLSCRASQSLGSFLAWYQQKPGQAPRLLIYGASYRATGIPARFSGSGSGTDFTLTISSLEPEDYAVYYCQQRGNWPITFGQGTRLEIK

SEQ ID NO: 89 - protein, 124 aa, Artificial Sequence; identical to SEQ ID NO: 7
  Description of Artificial Sequence: Synthetic polypeptide

SEQ ID NO: 90 - protein, 108 aa, Artificial Sequence
  Description of Artificial Sequence: Synthetic polypeptide
QDIQMTQSPATLSLSPGERATLSCRASQSVDSYLAWYQQKPGQAPRLLIYDASNRATGIPARFSGSGSGTDFTLTISNLEPEDFAVYYCQHRRSWPLTFGGGTKVEIK

SEQ ID NO: 91 - protein, 124 aa, Artificial Sequence; identical to SEQ ID NO: 7
  Description of Artificial Sequence: Synthetic polypeptide

SEQ ID NO: 92 - protein, 108 aa, Artificial Sequence
  Description of Artificial Sequence: Synthetic polypeptide
QDIQMTQSPATLSLSPGERATLSCRASQSVDSYLAWYQQKPGQAPRLLIYGASNRATGIPARFSGSGSGTDFTLTIASLEPEDFAVYYCQQRRKWPVTFGGGTKVEIK

SEQ ID NO: 93 - protein, 124 aa, Artificial Sequence; identical to SEQ ID NO: 7
  Description of Artificial Sequence: Synthetic polypeptide

SEQ ID NO: 94 - protein, 108 aa, Artificial Sequence
  Description of Artificial Sequence: Synthetic polypeptide
QDIQMTQSPATLSLSPGERATLSCRASQSVGGDIAWYQQKPGQAPRLLMYGASNRATGIPARFSGSGSGTDFTLTISSLEPEDFAVYYCQQRSYWPVTFGGGTRVEIK

SEQ ID NO: 95 - protein, 124 aa, Artificial Sequence; identical to SEQ ID NO: 7
  Description of Artificial Sequence: Synthetic polypeptide

SEQ ID NO: 96 - protein, 108 aa, Artificial Sequence
  Description of Artificial Sequence: Synthetic polypeptide
QDIQMTQSPATLSLSPGERATLSCRASQSVGRDLAWYQQKPGQAPRLLIYGATTRATGIPARFSGSGSGTDFTLTISSLEPEDFAVYFCQQRGNWPITFGQGTRLEIK

SEQ ID NO: 97 - protein, 124 aa, Artificial Sequence; identical to SEQ ID NO: 7
  Description of Artificial Sequence: Synthetic polypeptide

SEQ ID NO: 98 - protein, 108 aa, Artificial Sequence
  Description of Artificial Sequence: Synthetic polypeptide
QDIQMTQSPATLSLSPGERATLSCRASQSVGSDLAWYQQKHGQAPRLLMYGASTRATGIPARFSGSGSGTDFTLTISSLEPEDFAVYFCQQRGNWPITFGQGTRLEIK

SEQ ID NO: 99 - protein, 124 aa, Artificial Sequence; identical to SEQ ID NO: 7
  Description of Artificial Sequence: Synthetic polypeptide

SEQ ID NO: 100 - protein, 108 aa, Artificial Sequence
  Description of Artificial Sequence: Synthetic polypeptide
QDIQMTQSPATLSLSPGERATLSCRASQSVGSFLAWYQQKPGQAPRLLIYGASNRATGIPPRFSGSGSGTDFTLTISSLEPEDSAAYYCQQRGNWPITFGQGTRLEIK

SEQ ID NO: 101 - protein, 124 aa, Artificial Sequence; identical to SEQ ID NO: 7
  Description of Artificial Sequence: Synthetic polypeptide

SEQ ID NO: 102 - protein, 108 aa, Artificial Sequence
  Description of Artificial Sequence: Synthetic polypeptide
QDIQMTQSPATLSLSPGERATLSCRASQSVGSQLAWYQQKPGQAPRLLIYDASYRATGIPVRFSGSGSGTDFTLTISSLEPEDYAVYYCQQRGNWPITFGQGTRLEIK

SEQ ID NO: 103 - protein, 124 aa, Artificial Sequence; identical to SEQ ID NO: 7
  Description of Artificial Sequence: Synthetic polypeptide

SEQ ID NO: 104 - protein, 108 aa, Artificial Sequence
  Description of Artificial Sequence: Synthetic polypeptide
QDIQMTQSPATLSLSPGERATLSCRASQSVGTHLAWYQQKPGQAPRLLIYGASTRATGIPARFSGSGSGTEFTLTISSLQSEDFAIYHCQQRRSWPITFGQGTRLEIK

SEQ ID NO: 105 - protein, 124 aa, Artificial Sequence; identical to SEQ ID NO: 7
  Description of Artificial Sequence: Synthetic polypeptide

SEQ ID NO: 106 - protein, 108 aa, Artificial Sequence
  Description of Artificial Sequence: Synthetic polypeptide
QDIQMTQSPATLSLSPGERATLSCRASQSVNHFLAWYQQKPGQAPRLLIYGASNRATGVPARFNGTGSGTDFTLTISSLEPEDFAVYYCQQRGSWPITFGQGTRLEIK

SEQ ID NO: 107 - protein, 124 aa, Artificial Sequence; identical to SEQ ID NO: 7
  Description of Artificial Sequence: Synthetic polypeptide

SEQ ID NO: 108 - protein, 108 aa, Artificial Sequence
  Description of Artificial Sequence: Synthetic polypeptide
QDIQMTQSPATLSLSPGERATLSCRASQSVNSFLAWYQQKAGQAPRLLIYDASNRATGIPARFSGSGSGTDFTLTISSLEPEDFAVYYCQQRSNWPITFGQGTRLEIR

SEQ ID NO: 109 - protein, 124 aa, Artificial Sequence; identical to SEQ ID NO: 7
  Description of Artificial Sequence: Synthetic polypeptide

SEQ ID NO: 110 - protein, 108 aa, Artificial Sequence
  Description of Artificial Sequence: Synthetic polypeptide
QDIQMTQSPATLSLSPGERATLSCRASQSVNSYLAWYQQKPGQAPRLLIYDASNRATGIPARFSGSGSGTDFTLTISSLEPEDFAVYYCQQRGYWPPSFGGGTKVEIL

SEQ ID NO: 111 - protein, 124 aa, Artificial Sequence; identical to SEQ ID NO: 7
  Description of Artificial Sequence: Synthetic polypeptide

SEQ ID NO: 112 - protein, 108 aa, Artificial Sequence
  Description of Artificial Sequence: Synthetic polypeptide
QDIQMTQSPATLSLSPGERATLSCRASQSVSNFLAWYQQKPGQAPRLLIYGASSRATGIPDRFSGSGSGTDFTLTISSLEPEDFAVYYCQQRGNWPITFGQGTRLEIK

SEQ ID NO: 113 - protein, 124 aa, Artificial Sequence; identical to SEQ ID NO: 7
  Description of Artificial Sequence: Synthetic polypeptide

SEQ ID NO: 114 - protein, 108 aa, Artificial Sequence
  Description of Artificial Sequence: Synthetic polypeptide
QDIQMTQSPATLSLSPGERATLSCRASQSVSNYLAWYQQKRGQAPRLLIYGASTRATGIPARFSGSGSGTEFTLTISSLQSEDFAVYYCQQRGNWPITFGQGTRLEIK

SEQ ID NO: 115 - protein, 124 aa, Artificial Sequence; identical to SEQ ID NO: 7
  Description of Artificial Sequence: Synthetic polypeptide

SEQ ID NO: 116 - protein, 108 aa, Artificial Sequence
  Description of Artificial Sequence: Synthetic polypeptide
QDIQMTQSPATLSLSPGERATLSCRASQSVSRYLAWYQQKPGQAPRLLIYDASSRATGVPARFSGGGSGTDFTLTISSLEPEDFAVYYCHQRSSWPITFGQGTRLEIK

SEQ ID NO: 117 - protein, 124 aa, Artificial Sequence; identical to SEQ ID NO: 7
  Description of Artificial Sequence: Synthetic polypeptide

SEQ ID NO: 118 - protein, 108 aa, Artificial Sequence
  Description of Artificial Sequence: Synthetic polypeptide
QDIQMTQSPATLSLSPGERATLSCRASQSVSRYLAWYQQRPGQAPRLLIYDASNRATGIPARFSGSGSGTDFTLTISSLEPEDFAVYYCQQRINWPLTFGGGTKVEIK

SEQ ID NO: 119 - protein, 124 aa, Artificial Sequence; identical to SEQ ID NO: 7
  Description of Artificial Sequence: Synthetic polypeptide

SEQ ID NO: 120 - protein, 108 aa, Artificial Sequence
  Description of Artificial Sequence: Synthetic polypeptide
QDIQMTQSPATLSLSPGERATLSCRASQSVSSFLAWYQQKPGQAPRLLIYHASNRATGIPARFRGSGSGTDFTLTISSLEPEDFAVYYCQQRGNWPITFGQGTRLEIK

SEQ ID NO: 121 - protein, 124 aa, Artificial Sequence; identical to SEQ ID NO: 7
  Description of Artificial Sequence: Synthetic polypeptide

SEQ ID NO: 122 - protein, 108 aa, Artificial Sequence
  Description of Artificial Sequence: Synthetic polypeptide
QDIQMTQSPATLSLSPGERATLSCRASQSVSSFLAWYQQKPGRAPRLVIYDASNRASGIPARFSGSGSGADFTLTITSLEPEDFAVYYCQQRANWPLTFGGGTRVEIK

SEQ ID NO: 123 - protein, 124 aa, Artificial Sequence; identical to SEQ ID NO: 7
  Description of Artificial Sequence: Synthetic polypeptide

SEQ ID NO: 124 - protein, 108 aa, Artificial Sequence
  Description of Artificial Sequence: Synthetic polypeptide
QDIQMTQSPATLSLSPGERATLSCRASQSVSSHLAWYQQKPGQAPRLLIYGASSRATGIPDRFSGSGSGTDFTLTISRLEPEDFAVYYCQQRGNWPITFGQGTRLEIK

SEQ ID NO: 125 - protein, 124 aa, Artificial Sequence; identical to SEQ ID NO: 7
  Description of Artificial Sequence: Synthetic polypeptide

SEQ ID NO: 126 - protein, 108 aa, Artificial Sequence
  Description of Artificial Sequence: Synthetic polypeptide
QDIQMTQSPATLSLSPGERATLSCRASQSVSSYLAWYKQKPGQAPRLLIYDASNRATGIPARFSGSGSGTDFTLTISSLEPEDFAVYFCQQRGNWPITFGQGTRLEIK

SEQ ID NO: 127 - protein, 124 aa, Artificial Sequence; identical to SEQ ID NO: 7
  Description of Artificial Sequence: Synthetic polypeptide

SEQ ID NO: 128 - protein, 108 aa, Artificial Sequence
  Description of Artificial Sequence: Synthetic polypeptide
QDIQMTQSPATLSLSPGERATLSCRASQSVSSYLAWYKQKPGQAPRLLIYGASNRATGIPARFSGSGSGTDFTLTISSLEPEDFAVYFCQQRGNWPITFGQGTRLEIK

SEQ ID NO: 129 - protein, 124 aa, Artificial Sequence; identical to SEQ ID NO: 7
  Description of Artificial Sequence: Synthetic polypeptide

SEQ ID NO: 130 - protein, 108 aa, Artificial Sequence
  Description of Artificial Sequence: Synthetic polypeptide
QDIQMTQSPATLSLSPGERATLSCRASQSVSSYLAWYQQKPGHAPRLLIYGASHRATGIADRFSGSGSGTDFTLTISSLEPEDFAVYYCQQRSNWPITFGQGTRLEIK

SEQ ID NO: 131 - protein, 124 aa, Artificial Sequence; identical to SEQ ID NO: 7
  Description of Artificial Sequence: Synthetic polypeptide

SEQ ID NO: 132 - protein, 108 aa, Artificial Sequence
  Description of Artificial Sequence: Synthetic polypeptide
QDIQMTQSPATLSLSPGERATLSCRASQSVSSYLAWYQQKPGQAPRLLIYDASNRATGIPARFRGSGSGTDFTLTISSLEPEDFAVYYCQQRGNWPITFGQGTRLEIK

SEQ ID NO: 133 - protein, 124 aa, Artificial Sequence; identical to SEQ ID NO: 7
  Description of Artificial Sequence: Synthetic polypeptide

SEQ ID NO: 134 - protein, 108 aa, Artificial Sequence
  Description of Artificial Sequence: Synthetic polypeptide
QDIQMTQSPATLSLSPGERATLSCRASQSVSSYLAWYQQKPGQAPRLLIYDASNRATGIPARFSGSGSGTDFTLTISSLEPADFAVYYCQQRSNWPTTFGQGTRLEIK

SEQ ID NO: 135 - protein, 124 aa, Artificial Sequence; identical to SEQ ID NO: 7
  Description of Artificial Sequence: Synthetic polypeptide

SEQ ID NO: 136 - protein, 108 aa, Artificial Sequence
  Description of Artificial Sequence: Synthetic polypeptide
QDIQMTQSPATLSLSPGERATLSCRASQSVSSYLAWYQQKPGQAPRLLIYDASNRATGIPARFSGSGSGTDFTLTISSLEPEDFAVYYCQQRGNWPITFGQGTRLEIK

SEQ ID NO: 137 - protein, 124 aa, Artificial Sequence; identical to SEQ ID NO: 7
  Description of Artificial Sequence: Synthetic polypeptide

SEQ ID NO: 138 - protein, 108 aa, Artificial Sequence
  Description of Artificial Sequence: Synthetic polypeptide
QDIQMTQSPATLSLSPGERATLSCRASQSVSSYLAWYQQKPGQAPRLLIYGASNRATGIPARFSGSGSGTDFTLTISSLEPEDFVVYFCQQRSNWPITFGQGTRLEIK

SEQ ID NO: 139 - protein, 124 aa, Artificial Sequence; identical to SEQ ID NO: 7
  Description of Artificial Sequence: Synthetic polypeptide

SEQ ID NO: 140 - protein, 108 aa, Artificial Sequence
  Description of Artificial Sequence: Synthetic polypeptide
QDIQMTQSPATLSLSPGERATLSCRASQSVSSYLAWYQQKPGQAPRLLIYGASSRATGIPDRFSGSGSGTDFTLTISSLEPEDFAVYYCQQRSNWPVTFGPGTTVDIK

SEQ ID NO: 141 - protein, 124 aa, Artificial Sequence; identical to SEQ ID NO: 7
  Description of Artificial Sequence: Synthetic polypeptide

SEQ ID NO: 142 - protein, 108 aa, Artificial Sequence
  Description of Artificial Sequence: Synthetic polypeptide
QDIQMTQSPATLSLSPGERATLSCRASQSVSSYLAWYQQKPGQAPRLLIYGASTRATGIPARFSGSGSGTDFTLTISSLEPEDFAVYYCQQRGNWPITFGQGTRLEIK

SEQ ID NO: 143 - protein, 124 aa, Artificial Sequence; identical to SEQ ID NO: 7
  Description of Artificial Sequence: Synthetic polypeptide

SEQ ID NO: 144 - protein, 108 aa, Artificial Sequence
  Description of Artificial Sequence: Synthetic polypeptide
QDIQMTQSPATLSLSPGERATLSCRASQSVSSYLAWYQQKPGQAPRLLVFGASNRATGISDRFSGSGSGTDFTLTISRLEPEDFATYYCQQRGNWPPTFGGGTKVEIR

SEQ ID NO: 145 - protein, 124 aa, Artificial Sequence; identical to SEQ ID NO: 7
  Description of Artificial Sequence: Synthetic polypeptide

SEQ ID NO: 146 - protein, 108 aa, Artificial Sequence
  Description of Artificial Sequence: Synthetic polypeptide
QDIQMTQSPATLSLSPGERATLSCRASQSVSSYLAWYQQRLGQSPRLLIYGASNRATGIPDRFSGSGSGTDFTLTISSLEPEDFAVYYCEQRRSWPLTFGGGTKVEIK

SEQ ID NO: 147 - protein, 124 aa, Artificial Sequence; identical to SEQ ID NO: 7
  Description of Artificial Sequence: Synthetic polypeptide

SEQ ID NO: 148 - protein, 108 aa, Artificial Sequence
  Description of Artificial Sequence: Synthetic polypeptide
QDIQMTQSPATLSLSPGERATLSCRASRSVGTHLAWYQQKPGQPPRLLIYDASVRAAGVPARFSGSGSGTDFTLSISSLESDDFAVYYCQQRGGWPITFGGGTKVEIK

SEQ ID NO: 149 - protein, 124 aa, Artificial Sequence; identical to SEQ ID NO: 7
  Description of Artificial Sequence: Synthetic polypeptide

SEQ ID NO: 150 - protein, 108 aa, Artificial Sequence
  Description of Artificial Sequence: Synthetic polypeptide
QDIQMTQSPATLSLSPGERATLSCRASRSVGTHLAWYQQKPGQPPRLLIYDASVRAAGVPARFSGSGSGTDFTLTISSLEPEDFAVYFCQQRGNWPITFGQGTRLEIK

SEQ ID NO: 151 - protein, 124 aa, Artificial Sequence; identical to SEQ ID NO: 7
  Description of Artificial Sequence: Synthetic polypeptide

SEQ ID NO: 152 - protein, 108 aa, Artificial Sequence
  Description of Artificial Sequence: Synthetic polypeptide
QDIQMTQSPATLSLSPGERATLSCRTSQSVSRYLAWYQQKPGQAPRLLIYGTSNRATGIPARFSGSGSGTDFTLTIDSLEPEDFAIYYCQQRYNWPITFGQGTRLEIK

SEQ ID NO: 153 - protein, 124 aa, Artificial Sequence; identical to SEQ ID NO: 7
  Description of Artificial Sequence: Synthetic polypeptide

SEQ ID NO: 154 - protein, 108 aa, Artificial Sequence
  Description of Artificial Sequence: Synthetic polypeptide
QDIQMTQSPATLSLSPGERATLSCRTSQSVSRYLAWYQQKPGQAPRLLIYGTSNRATGIPARFSGSGSGTDFTLTISSLEPEDFAVYYCQQRYNWPITFGQGTRLEIK

SEQ ID NO: 155 - protein, 124 aa, Artificial Sequence; identical to SEQ ID NO: 7
  Description of Artificial Sequence: Synthetic polypeptide

SEQ ID NO: 156 - protein, 109 aa, Artificial Sequence
  Description of Artificial Sequence: Synthetic polypeptide
QDIQMTQSPATLSLSPGERATLTCRASQSLSRSDLAWYQQRPGQAPRLLIFGASNRATDTPDRFSGSGSGTDFTLTITRLEPEDFAVYYCQQRSNWPPTFGQGTKLEIK

SEQ ID NO: 157 - protein, 124 aa, Artificial Sequence; identical to SEQ ID NO: 7
  Description of Artificial Sequence: Synthetic polypeptide

SEQ ID NO: 158 - protein, 108 aa, Artificial Sequence
  Description of Artificial Sequence: Synthetic polypeptide
QDIQMTQSPATLSLSPGESATLSCRASQSVSSYLAWYQQKPGQAPRLLIYGASNRATGIPARFSGSGSGTDFTLTISSLEPEDFVVYFCQQRSNWPITFGQGTRLEIK

SEQ ID NO: 159 - protein, 124 aa, Artificial Sequence; identical to SEQ ID NO: 7
  Description of Artificial Sequence: Synthetic polypeptide

SEQ ID NO: 160 - protein, 108 aa, Artificial Sequence
  Description of Artificial Sequence: Synthetic polypeptide
QDIQMTQSPATLSLSPGETAILSCRASQSVGRFLAWYQQKPGQAPRLLIYGASSRATGIPDRFSGSGSGTEFTLTISSLQSEDFAVYYCQQRGNWPITFGQGTRLEIK

SEQ ID NO: 161 - protein, 124 aa, Artificial Sequence; identical to SEQ ID NO: 7
  Description of Artificial Sequence: Synthetic polypeptide

SEQ ID NO: 162 - protein, 108 aa, Artificial Sequence
  Description of Artificial Sequence: Synthetic polypeptide
QDIQMTQSPATLSLSPGETATLSCRASQPVGSYLAWYQQKPGQAPRLLIYGASNRATGIPARFSGSGSGTDFTLTISSLEPEDFAVYYCQQRGNWPLTFGGGTKVEIK

SEQ ID NO: 163 - protein, 124 aa, Artificial Sequence; identical to SEQ ID NO: 7
  Description of Artificial Sequence: Synthetic polypeptide

SEQ ID NO: 164 - protein, 108 aa, Artificial Sequence
  Description of Artificial Sequence: Synthetic polypeptide
QDIQMTQSPATLSLSPGETATLSCRASQSVGYYLAWYQQRPGQAPRLLIFGASRRATGIPDRFSGSGSGTDFTLTISRLEPEDFAVYYCQQRSNWPITFGQGTRLEIK

SEQ ID NO: 165 - protein, 124 aa, Artificial Sequence; identical to SEQ ID NO: 7
  Description of Artificial Sequence: Synthetic polypeptide

SEQ ID NO: 166 - protein, 108 aa, Artificial Sequence
  Description of Artificial Sequence: Synthetic polypeptide
QDIQMTQSPATLSVSPGDRATLSCRTSQRVDSNLAWYQQKPGQPPRLLIYGASTRATGVPTRFRGSGSGTDFTLTITSLEPEDFAVYYCQQRRKWPVTFGGGTKVEIK

SEQ ID NO: 167 - protein, 124 aa, Artificial Sequence; identical to SEQ ID NO: 7
  Description of Artificial Sequence: Synthetic polypeptide

SEQ ID NO: 168 - protein, 108 aa, Artificial Sequence
  Description of Artificial Sequence: Synthetic polypeptide
QDIQMTQSPATLSVSPGDTATLSCRASQSVGSDLAWYQQKPGQAPRLLIYGASSRATGIPDRFSGSGSGTDFTLTISRLEPEDFAVYYCQQRGNWPITFGQGTRLEIK

SEQ ID NO: 169 - protein, 124 aa, Artificial Sequence; identical to SEQ ID NO: 7
  Description of Artificial Sequence: Synthetic polypeptide

SEQ ID NO: 170 - protein, 108 aa, Artificial Sequence
  Description of Artificial Sequence: Synthetic polypeptide
QDIQMTQSPATLSVSPGEIATLSCRASQNIGSNLAWYQQKPGQAPRLLIYGASTRAPGIPARFSGSGSGTEFTLTIRSLQSEDFAVYYCQQRRKWPVTFGGGTKVEIK

SEQ ID NO: 171 - protein, 124 aa, Artificial Sequence; identical to SEQ ID NO: 7
  Description of Artificial Sequence: Synthetic polypeptide

SEQ ID NO: 172 - protein, 108 aa, Artificial Sequence
  Description of Artificial Sequence: Synthetic polypeptide
QDIQMTQSPATLSVSPGEKVTLSCRASQNIITNLAWYQQKPGQAPRLLIYGASTRATGIPARFSGSGSGTDFTLTISSLEPEDFAVYYCQQRSNWPITFGPGTKVDIK

SEQ ID NO: 173 - protein, 124 aa, Artificial Sequence; identical to SEQ ID NO: 7
  Description of Artificial Sequence: Synthetic polypeptide

SEQ ID NO: 174 - protein, 108 aa, Artificial Sequence
  Description of Artificial Sequence: Synthetic polypeptide
QDIQMTQSPATLSVSPGERATLSCRASHSVGSDLAWYQQKPGQAPRLLISGASTRTAGIPARFSGSGSGTDFTLTISNLEPEDFAVYYCQQRGNWPPTFGGGTKVEIR

SEQ ID NO: 175 - protein, 124 aa, Artificial Sequence; identical to SEQ ID NO: 7
  Description of Artificial Sequence: Synthetic polypeptide

SEQ ID NO: 176 - protein, 108 aa, Artificial Sequence
  Description of Artificial Sequence: Synthetic polypeptide
QDIQMTQSPATLSVSPGERATLSCRASQGVGSDLAWYLQKPGQAPRLLIYGASSRATGIPDRFSGSGSGTDFTLTISRLEPEDFAVYYCQQRRSWPPTFGQGTKVEIK

SEQ ID NO: 177 - protein, 124 aa, Artificial Sequence; identical to SEQ ID NO: 7
  Description of Artificial Sequence: Synthetic polypeptide

SEQ ID NO: 178 - protein, 108 aa, Artificial Sequence
  Description of Artificial Sequence: Synthetic polypeptide
QDIQMTQSPATLSVSPGERATLSCRASQNVNRDLAWYQQKPGQAPRLLIFGASTRATGIPARFSGSGSGTDFTLTISSLEPEDFAVYFCQQRGNWPITFGQGTRLEIK

SEQ ID NO: 179 - protein, 124 aa, Artificial Sequence; identical to SEQ ID NO: 7
  Description of Artificial Sequence: Synthetic polypeptide

SEQ ID NO: 180 - protein, 108 aa, Artificial Sequence
  Description of Artificial Sequence: Synthetic polypeptide
QDIQMTQSPATLSVSPGERATLSCRASQSINSDLAWYQQKPGQAPRLLIYHTSYRAPGIPARFRGSGSGTDFTLTISSLEPEDFALYFCQQRSDWPVTFGPGTKVDVK

SEQ ID NO: 181 - protein, 124 aa, Artificial Sequence; identical to SEQ ID NO: 7
  Description of Artificial Sequence: Synthetic polypeptide

SEQ ID NO: 182 - protein, 108 aa, Artificial Sequence
  Description of Artificial Sequence: Synthetic polypeptide
QDIQMTQSPATLSVSPGERATLSCRASQSISSDLAWYQQRPGQAPRLLIYGASSRATGVPARFSGSGSGTEFALTISSLEPEDFAVYYCQQRSYWPVTFGGGTRVEIK

SEQ ID NO: 183 - protein, 124 aa, Artificial Sequence; identical to SEQ ID NO: 7
  Description of Artificial Sequence: Synthetic polypeptide

SEQ ID NO: 184 - protein, 108 aa, Artificial Sequence
  Description of Artificial Sequence: Synthetic polypeptide
QDIQMTQSPATLSVSPGERATLSCRASQSISSFLAWYQQKPGQAPRLLIYDASYRATGIPARFSGSGSGTDFTLTISSLEPEDYAVYYCQQRGNWPITFGQGTRLEIK

SEQ ID NO: 185 - protein, 124 aa, Artificial Sequence; identical to SEQ ID NO: 7
  Description of Artificial Sequence: Synthetic polypeptide

SEQ ID NO: 186 - protein, 108 aa, Artificial Sequence
  Description of Artificial Sequence: Synthetic polypeptide
QDIQMTQSPATLSVSPGERATLSCRASQSVGADLAWYQQKPGQAPRLLIYHASTRATGVPARFSGSGSGSEFTLAISSLQSEDFAVYFCQQRGNWPPTFGGGTKVDIK

SEQ ID NO: 187 - protein, 124 aa, Artificial Sequence; identical to SEQ ID NO: 7
  Description of Artificial Sequence: Synthetic polypeptide

SEQ ID NO: 188 - protein, 108 aa, Artificial Sequence
  Description of Artificial Sequence: Synthetic polypeptide
QDIQMTQSPATLSVSPGERATLSCRASQSVGSDLAWYQQKHGQAPRLLMYGASHRATGIPARFSGSGSGTDFTLTISSLEPEDFAVYYCQQRYNWPITFGGGTKVEIK

SEQ ID NO: 189 - protein, 124 aa, Artificial Sequence; identical to SEQ ID NO: 7
  Description of Artificial Sequence: Synthetic polypeptide

SEQ ID NO: 190 - protein, 108 aa, Artificial Sequence
  Description of Artificial Sequence: Synthetic polypeptide
QDIQMTQSPATLSVSPGERATLSCRASQSVGSDLAWYQQKHGQAPRLLMYGASTRATGIPDRFSGSGSGTDFTLTISRLEPEDFAVYYCQQRGNWPPTFGGGTKVEIR

SEQ ID NO: 191 - protein, 124 aa, Artificial Sequence; identical to SEQ ID NO: 7
  Description of Artificial Sequence: Synthetic polypeptide

SEQ ID NO: 192 - protein, 108 aa, Artificial Sequence
  Description of Artificial Sequence: Synthetic polypeptide
QDIQMTQSPATLSVSPGERATLSCRASQSVGSNLAWYQQKPGQAPRLLIYGASIRATGIPARFSGSGSGTDFTLTISSLEPEDFAVYFCQQRGNWPITFGQGTRLEIK

SEQ ID NO: 193 - protein, 124 aa, Artificial Sequence; identical to SEQ ID NO: 7
  Description of Artificial Sequence: Synthetic polypeptide

SEQ ID NO: 194 - protein, 108 aa, Artificial Sequence
  Description of Artificial Sequence: Synthetic polypeptide
QDIQMTQSPATLSVSPGERATLSCRASQSVGSNLAWYQQKPGQAPRLLIYGASTRATGIPARFSGSGSGTEFTLTISSLQSEDFAMYYCQQRAYWPVSFGGGTKVEIK

SEQ ID NO: 195 - protein, 124 aa, Artificial Sequence; identical to SEQ ID NO: 7
  Description of Artificial Sequence: Synthetic polypeptide

SEQ ID NO: 196 - protein, 108 aa, Artificial Sequence
  Description of Artificial Sequence: Synthetic polypeptide
QDIQMTQSPATLSVSPGERATLSCRASQSVGSNLAWYQQKPGQAPRLLIYGASTRATGIPARFSGSGSGTEFTLTISSLQSEDFAVYYCQQRGNWPITFGQGTRLEIK

SEQ ID NO: 197 - protein, 124 aa, Artificial Sequence; identical to SEQ ID NO: 7
  Description of Artificial Sequence: Synthetic polypeptide

SEQ ID NO: 198 - protein, 108 aa, Artificial Sequence
  Description of Artificial Sequence: Synthetic polypeptide
QDIQMTQSPATLSVSPGERATLSCRASQSVGSNLAWYQQKPGQAPRLLIYGASTRATGIPARFSGSGSGTEFTLTVSSLQSEDFAVYYCQQRRNWPVTFGPGTKLDFK

SEQ ID NO: 199 - protein, 124 aa, Artificial Sequence; identical to SEQ ID NO: 7
  Description of Artificial Sequence: Synthetic polypeptide

SEQ ID NO: 200 - protein, 108 aa, Artificial Sequence
  Description of Artificial Sequence: Synthetic polypeptide
QDIQMTQSPATLSVSPGERATLSCRASQSVGSQLAWYQQKPGQAPRLVVYDASTRATGIPARFSGSGSGTDFTLTISSLEPEDYAVYYCQQRGNWPITFGQGTRLEIK

SEQ ID NO: 201 - protein, 124 aa, Artificial Sequence; identical to SEQ ID NO: 7
  Description of Artificial Sequence: Synthetic polypeptide

SEQ ID NO: 202 - protein, 108 aa, Artificial Sequence
  Description of Artificial Sequence: Synthetic polypeptide
QDIQMTQSPATLSVSPGERATLSCRASQSVNSDLAWYQQKPGQAPRLLIYGASTRATGIPARFSGSGSGTDFTLTISSLEPEDYAVYYCQQRGNWPITFGQGTRLEIK

SEQ ID NO: 203 - protein, 124 aa, Artificial Sequence; identical to SEQ ID NO: 7
  Description of Artificial Sequence: Synthetic polypeptide

SEQ ID NO: 204 - protein, 108 aa, Artificial Sequence
  Description of Artificial Sequence: Synthetic polypeptide
QDIQMTQSPATLSVSPGERATLSCRASQSVNTDLAWYQQKPGQAPRLLIYGASTRATGIPARFSGSGSGTEFTLTISSLQSEDFAVYYCQQRRNWPVTFGQGTRLEII

SEQ ID NO: 205 - protein, 124 aa, Artificial Sequence; identical to SEQ ID NO: 7
  Description of Artificial Sequence: Synthetic polypeptide

SEQ ID NO: 206 - protein, 108 aa, Artificial Sequence
  Description of Artificial Sequence: Synthetic polypeptide
QDIQMTQSPATLSVSPGERATLSCRASQSVSSDLAWYQQIPGQAPRLLIYGASTRATGIPVRFSGSGSGTNFTLTISSLEPEDFAVYYCQQRRKWPVTFGGGTKVEIK

SEQ ID NO: 207 - protein, 124 aa, Artificial Sequence; identical to SEQ ID NO: 7
  Description of Artificial Sequence: Synthetic polypeptide

SEQ ID NO: 208 - protein, 108 aa, Artificial Sequence
  Description of Artificial Sequence: Synthetic polypeptide
QDIQMTQSPATLSVSPGERATLSCRASQSVSSDLAWYQQKPGQAPRLLIYAASTRATGIPARFSGSGSGTEFTLTISSLQSEDFAVYYCQQRSNWPVTFGQGTKLEIK

SEQ ID NO: 209 - protein, 124 aa, Artificial Sequence; identical to SEQ ID NO: 7
  Description of Artificial Sequence: Synthetic polypeptide

SEQ ID NO: 210 - protein, 108 aa, Artificial Sequence
  Description of Artificial Sequence: Synthetic polypeptide
QDIQMTQSPATLSVSPGERATLSCRASQSVSSDLAWYQQKPGQAPRLLIYHTSYRAPGIPARFRGSGSGTDFTLTISSLEPEDFALYFCQQRSDWPVTFGPGTKVDVK

SEQ ID NO: 211 - protein, 124 aa, Artificial Sequence; identical to SEQ ID NO: 7
  Description of Artificial Sequence: Synthetic polypeptide

SEQ ID NO: 212 - protein, 108 aa, Artificial Sequence
  Description of Artificial Sequence: Synthetic polypeptide
QDIQMTQSPATLSVSPGERATLSCRASQSVSSDLAWYQQKPGQAPRLLIYRASIRATGIPARFSGSGSGTDFTLTISSLEPEDFAVYFCQQRGFWPITFGQGTRLEIK

SEQ ID NO: 213 - protein, 124 aa, Artificial Sequence; identical to SEQ ID NO: 7
  Description of Artificial Sequence: Synthetic polypeptide

SEQ ID NO: 214 - protein, 110 aa, Artificial Sequence
  Description of Artificial Sequence: Synthetic polypeptide
QDIQMTQSPATLSVSPGERATLSCRASQSVSSDLAWYQQKPGQAPRLLIYRASIRATGIPARFSGSGSGTEFTLTISSLQSEDFAVYYCQQRSAWPVTFGGGSKVDIKRT

SEQ ID NO: 215 - protein, 124 aa, Artificial Sequence; identical to SEQ ID NO: 7
  Description of Artificial Sequence: Synthetic polypeptide

SEQ ID NO: 216 - protein, 108 aa, Artificial Sequence
  Description of Artificial Sequence: Synthetic polypeptide
QDIQMTQSPATLSVSPGERATLSCRASQSVSSDLAWYQQRPGQAPRLLIFGASTRATGIPARFSGSGSGTDFSLTISSLEPEDFAVYYCQQRSNWPPTFGGGTKVEIK

SEQ ID NO: 217 - protein, 124 aa, Artificial Sequence; identical to SEQ ID NO: 7
  Description of Artificial Sequence: Synthetic polypeptide

SEQ ID NO: 218 - protein, 108 aa, Artificial Sequence
  Description of Artificial Sequence: Synthetic polypeptide
QDIQMTQSPATLSVSPGERATLSCRASQSVSSNLAWYQQKPGQAPRLLIYGASTRATGIPARFSGSGSGTEFTLTISSLEPEDFAVYYCQQCYNWPPTFGQGTKVEIK

SEQ ID NO: 219 - protein, 124 aa, Artificial Sequence; identical to SEQ ID NO: 7
  Description of Artificial Sequence: Synthetic polypeptide

SEQ ID NO: 220 - protein, 108 aa, Artificial Sequence
  Description of Artificial Sequence: Synthetic polypeptide
QDIQMTQSPATLSVSPGERATLSCRASQSVSSNLAWYQQKPGQAPRLLIYGASTRATGIPARFSGSGSGTEFTLTISSLQSEDFAVYYCQQRGNWPITFGQGTRLEIK

SEQ ID NO: 221 - protein, 124 aa, Artificial Sequence; identical to SEQ ID NO: 7
  Description of Artificial Sequence: Synthetic polypeptide

SEQ ID NO: 222-223 - skipped (2 entries)

SEQ ID NO: 224 - protein, 108 aa, Artificial Sequence
  Description of Artificial Sequence: Synthetic polypeptide
QDIQMTQSPATLSVSPGERATLSCRASQSVSSNLAWYQQKPGQAPRLLIYHASTRATGVPARFSGSGSGSEFTLAISSLEPEDFAVYFCQQRGFWPITFGQGTRLEIK

SEQ ID NO: 225 - protein, 124 aa, Artificial Sequence; identical to SEQ ID NO: 7
  Description of Artificial Sequence: Synthetic polypeptide

SEQ ID NO: 226 - protein, 108 aa, Artificial Sequence
  Description of Artificial Sequence: Synthetic polypeptide
QDIQMTQSPATLSVSPGERATLSCRASQSVSSYLAWYQQRPGQAPRLLIFGASNTATGIPARFSGSGSGTDFTLTISSLEPEDFGVYYCQQRRNWPPTFGQGTKLEIK

SEQ ID NO: 227 - protein, 124 aa, Artificial Sequence; identical to SEQ ID NO: 7
  Description of Artificial Sequence: Synthetic polypeptide

SEQ ID NO: 228 - protein, 108 aa, Artificial Sequence
  Description of Artificial Sequence: Synthetic polypeptide
QDIQMTQSPATLSVSPGERATLSCRASQSVWSNLAWYQQKPGQAPRLLIYDASYRATGIPARFSGSGSGTDFTLTISSLEPEDYAVYYCQQRGNWPITFGQGTRLEIK

SEQ ID NO: 229 - protein, 124 aa, Artificial Sequence; identical to SEQ ID NO: 7
  Description of Artificial Sequence: Synthetic polypeptide

SEQ ID NO: 230 - protein, 108 aa, Artificial Sequence
  Description of Artificial Sequence: Synthetic polypeptide
QDIQMTQSPATLSVSPGERATLSCRASQTVGTFLAWYQHRPGQAPRLLIYGASTRATGIPARFSGSGSGTEFTLTISSLEPEDFAVYYCQQRSNWPPTFGQGTKVEIK

SEQ ID NO: 231 - protein, 124 aa, Artificial Sequence; identical to SEQ ID NO: 7
  Description of Artificial Sequence: Synthetic polypeptide

SEQ ID NO: 232 - protein, 108 aa, Artificial Sequence
  Description of Artificial Sequence: Synthetic polypeptide
QDIQMTQSPATLSVSPGERATVSCRASESVNSDLAWYQQKPGQAPRLLIYGASTRATGIPARFSGSGSGTEFTLTISSMESEDFAVYYCQQRGSWPITFGQGTRLEIK

SEQ ID NO: 233 - protein, 124 aa, Artificial Sequence; identical to SEQ ID NO: 7
  Description of Artificial Sequence: Synthetic polypeptide

SEQ ID NO: 234 - protein, 108 aa, Artificial Sequence
  Description of Artificial Sequence: Synthetic polypeptide
QDIQMTQSPATLSVSPGERVILSCRASQNINSDLAWYKQIPGQAPRLLIYGASTRATGVPARISGSGSGTEFTLTISSLQSEDFAVYYCQQRGGWPITFGGGTKVEIK

SEQ ID NO: 235 - protein, 124 aa, Artificial Sequence; identical to SEQ ID NO: 7
  Description of Artificial Sequence: Synthetic polypeptide

SEQ ID NO: 236-237 - skipped (2 entries)

SEQ ID NO: 238 - protein, 108 aa, Artificial Sequence
  Description of Artificial Sequence: Synthetic polypeptide
QDIQMTQSPATLSVSPGERVTLSCRASQTIFGDLAWFQQKPGQSPRLLIYGASTRATDIPARFSGSGSGTEFTLTISSLEPEDFAVYYCQQRSNWPPTFGGGTKVEIK

SEQ ID NO: 239 - protein, 124 aa, Artificial Sequence; identical to SEQ ID NO: 7
  Description of Artificial Sequence: Synthetic polypeptide

SEQ ID NO: 240 - protein, 108 aa, Artificial Sequence
  Description of Artificial Sequence: Synthetic polypeptide
QDIQMTQSPATLSVSPGERVTLSCRASRSVSNNVAWYQQKPGQAPRLLISEASNRATGVPARFTGSGSGIDFSLSISSLEPEDFAIYYCQQRGGWPITFGGGTKVEIK

SEQ ID NO: 241 - protein, 124 aa, Artificial Sequence; identical to SEQ ID NO: 7
  Description of Artificial Sequence: Synthetic polypeptide

SEQ ID NO: 242 - protein, 108 aa, Artificial Sequence
  Description of Artificial Sequence: Synthetic polypeptide
QDIQMTQSPATVSLSPGERVTLSCRASQSVSNYLAWYQQKPGQAPRLLIYGASNRATGIPARFSGSGSGTDFTLTISSLEPEDFAVYYCQQRRSWPPTFGQGTKVEIK

SEQ ID NO: 243 - protein, 124 aa, Artificial Sequence; identical to SEQ ID NO: 7
  Description of Artificial Sequence: Synthetic polypeptide

SEQ ID NO: 244 - protein, 108 aa, Artificial Sequence
  Description of Artificial Sequence: Synthetic polypeptide
QDIQMTQSPATVSVSPGERATLSCRASQSVGSDLAWYQQKPGQAPRLLIYGASTRATGIPARFSGSGSGTEFTLTITSLQSEDFAVYYCQQRSNWPVTFGGGTKVEIK

SEQ ID NO: 245 - protein, 124 aa, Artificial Sequence; identical to SEQ ID NO: 7
  Description of Artificial Sequence: Synthetic polypeptide

SEQ ID NO: 246 - protein, 108 aa, Artificial Sequence
  Description of Artificial Sequence: Synthetic polypeptide
QDIQMTQSPDILSLSPGERATISCRASQSVNSHVAWYQQKPGQPPRLLIYEASDRAAGVPARFRGSGSGTLFSLTISSLQPEDFVVYYCQQRMYWPPTFGEGTKLERR

SEQ ID NO: 247 - protein, 124 aa, Artificial Sequence; identical to SEQ ID NO: 7
  Description of Artificial Sequence: Synthetic polypeptide

SEQ ID NO: 248 - protein, 109 aa, Artificial Sequence
  Description of Artificial Sequence: Synthetic polypeptide
QDIQMTQSPDTLSLSPGERATLTCRASQSLSRSDLAWYQQRPGQAPRLLIFGASNRATDTPDRFSGSGSGTDFTLTITRLEPEDFAVYYCQQRSNWPPTFGQGTKVEIT

SEQ ID NO: 249 - protein, 124 aa, Artificial Sequence; identical to SEQ ID NO: 7
  Description of Artificial Sequence: Synthetic polypeptide

SEQ ID NO: 250 - protein, 108 aa, Artificial Sequence
  Description of Artificial Sequence: Synthetic polypeptide
QDIQMTQSPDTLSVSPGERATLSCRASQNIGSNLAWYQHKSGQAPRLLIYGATTRATGIPARFSGSGSGTEFTLTISSLQSEDFAVYFCQQRGNWPITFGQGTRLEIK

SEQ ID NO: 251 - protein, 124 aa, Artificial Sequence; identical to SEQ ID NO: 7
  Description of Artificial Sequence: Synthetic polypeptide

SEQ ID NO: 252 - protein, 108 aa, Artificial Sequence
  Description of Artificial Sequence: Synthetic polypeptide
QDIQMTQSPDTVSVSPGEGATLSCRASQGINNNLAWYQQKPGQAPRLLIYDASNRATGIPARFSGSGSGTDFTLTISSLEPEDFAVYFCQQRGNWPITFGQGTRLEIK

SEQ ID NO: 253 - protein, 124 aa, Artificial Sequence; identical to SEQ ID NO: 7
  Description of Artificial Sequence: Synthetic polypeptide

SEQ ID NO: 254 - protein, 108 aa, Artificial Sequence
  Description of Artificial Sequence: Synthetic polypeptide
QDIQMTQSPGTLSFSPGERASLSCRASQSVSSDLAWYQQKPGQAPRLLIYGASNRATGIPVRFSGSGSGTDFTLTISRLEPEDFAVYYCQQRSKWPITFGQGTRLEIK

SEQ ID NO: 255 - protein, 124 aa, Artificial Sequence; identical to SEQ ID NO: 7
  Description of Artificial Sequence: Synthetic polypeptide

SEQ ID NO: 256 - protein, 108 aa, Artificial Sequence
  Description of Artificial Sequence: Synthetic polypeptide
QDIQMTQSPGTLSLSPGDRATLSCRASQSVGSDLAWYQQKPGQAPRLLIYGASNRATGIPVRFSGSGSGTDFTLTISSLEPEDFAVYYCQQRSNWPITFGQGTRLEIK

SEQ ID NO: 257 - protein, 124 aa, Artificial Sequence; identical to SEQ ID NO: 7
  Description of Artificial Sequence: Synthetic polypeptide

SEQ ID NO: 258 - protein, 108 aa, Artificial Sequence
  Description of Artificial Sequence: Synthetic polypeptide
QDIQMTQSPGTLSLSPGDRATLSCRASQSVGSFLAWYQQRPGQAPRLLIYGASNRAPGIPARFSGSGSGTDFTLTISSLEPEDFAVYFCQQRHNWPITFGQGTRLEIK

SEQ ID NO: 259 - protein, 124 aa, Artificial Sequence; identical to SEQ ID NO: 7
  Description of Artificial Sequence: Synthetic polypeptide

SEQ ID NO: 260 - protein, 108 aa, Artificial Sequence
  Description of Artificial Sequence: Synthetic polypeptide
QDIQMTQSPGTLSLSPGEGATLSCRASQSVSNYLAWYQQKPGQAPRLLIYGVSNRATGIPDRFSGSGSGTDFTLTISRLEPEDFAVYYCQQRGNWPPTFGGGTKVEIR

SEQ ID NO: 261 - protein, 124 aa, Artificial Sequence; identical to SEQ ID NO: 7
  Description of Artificial Sequence: Synthetic polypeptide

SEQ ID NO: 262 - protein, 109 aa, Artificial Sequence
  Description of Artificial Sequence: Synthetic polypeptide
QDIQMTQSPGTLSLSPGERATLSCRASQNLGRSDLAWYQQKPGQAPKFLIFGVSNRATGTPDRFSGSGSGTDFTLTISSLEPEDFAVYYCQQRSNWPPTFGGGTKVEIK

SEQ ID NO: 263 - protein, 124 aa, Artificial Sequence; identical to SEQ ID NO: 7
  Description of Artificial Sequence: Synthetic polypeptide

SEQ ID NO: 264 - protein, 108 aa, Artificial Sequence
  Description of Artificial Sequence: Synthetic polypeptide
QDIQMTQSPGTLSLSPGERATLSCRASQNVHTYLAWYQQKPGQAPRLLISEASNRATGVPARFTGSGSGIDFSLSISSLEPEDFAIYYCQQRGGWPITFGGGTKVEIK

SEQ ID NO: 265 - protein, 124 aa, Artificial Sequence; identical to SEQ ID NO: 7
  Description of Artificial Sequence: Synthetic polypeptide

SEQ ID NO: 266 - protein, 108 aa, Artificial Sequence
  Description of Artificial Sequence: Synthetic polypeptide
QDIQMTQSPGTLSLSPGERATLSCRASQSISSFLAWYQQKPGQAPRLLIYDASYRATGIPARFSGSGSGTDFTLTISSLEPEDYAVYYCQQRGNWPITFGQGTRLEIK

SEQ ID NO: 267 - protein, 124 aa, Artificial Sequence; identical to SEQ ID NO: 7
  Description of Artificial Sequence: Synthetic polypeptide

SEQ ID NO: 268 - protein, 109 aa, Artificial Sequence
  Description of Artificial Sequence: Synthetic polypeptide
QDIQMTQSPGTLSLSPGERATLSCRASQSLGRGDLAWYQQNPGQPPRLLIYGASSRATGIPDRFSGSGSGTDFTLTISRLEPEDFAVYYCQQRSNWPPTFGGGTKVEIK

SEQ ID NO: 269 - protein, 124 aa, Artificial Sequence; identical to SEQ ID NO: 7
  Description of Artificial Sequence: Synthetic polypeptide

SEQ ID NO: 270 - protein, 109 aa, Artificial Sequence
  Description of Artificial Sequence: Synthetic polypeptide
QDIQMTQSPGTLSLSPGERATLSCRASQSLGRSDLAWYQQKPGQAPRLLIFGVSNRVTGTPDRFSGSGSGTDFTLTIGSLEPEDFAVYYCQQRSNWPSTFGQGTRLEIK

SEQ ID NO: 271 - protein, 124 aa, Artificial Sequence; identical to SEQ ID NO: 7
  Description of Artificial Sequence: Synthetic polypeptide

SEQ ID NO: 272 - protein, 109 aa, Artificial Sequence
  Description of Artificial Sequence: Synthetic polypeptide
QDIQMTQSPGTLSLSPGERATLSCRASQSLSGNYLAWYQQKPGQAPRLLIYGASSRATGVSDRFSGSGSGTDFTLTISRLEPEDFAVYYCQQRSNWPITFGQGTRLEIK

SEQ ID NO: 273 - protein, 124 aa, Artificial Sequence; identical to SEQ ID NO: 7
  Description of Artificial Sequence: Synthetic polypeptide

SEQ ID NO: 274 - protein, 108 aa, Artificial Sequence
  Description of Artificial Sequence: Synthetic polypeptide
QDIQMTQSPGTLSLSPGERATLSCRASQSVARYLAWYQQKPGQAPRLLIYGASRRGTGIPDRFSGSGSGTDFTLTISSLEPEDFAVYYCQQRRKWPVTFGPGTKVDIK

SEQ ID NO: 275 - protein, 124 aa, Artificial Sequence; identical to SEQ ID NO: 7
  Description of Artificial Sequence: Synthetic polypeptide

SEQ ID NO: 276 - protein, 108 aa, Artificial Sequence
  Description of Artificial Sequence: Synthetic polypeptide
QDIQMTQSPGTLSLSPGERATLSCRASQSVGADLAWYQQKPGQAPRLLIYHASTRATGVPARFSGSGSGSEFTLAISSLQSEDFAVYFCQQRGFWPITFGQGTRLEIK

SEQ ID NO: 277 - protein, 124 aa, Artificial Sequence; identical to SEQ ID NO: 7
  Description of Artificial Sequence: Synthetic polypeptide

SEQ ID NO: 278 - protein, 108 aa, Artificial Sequence
  Description of Artificial Sequence: Synthetic polypeptide
QDIQMTQSPGTLSLSPGERATLSCRASQSVGSDLAWYQQKPGQAPRLLIYGASTRATGIPGRFSGSGSGTEFTLTISSLEPEDFGVYYCQQRRSWPPTFGGGTKVEIK

SEQ ID NO: 279 - protein, 124 aa, Artificial Sequence; identical to SEQ ID NO: 7
  Description of Artificial Sequence: Synthetic polypeptide

SEQ ID NO: 280 - protein, 108 aa, Artificial Sequence
  Description of Artificial Sequence: Synthetic polypeptide
QDIQMTQSPGTLSLSPGERATLSCRASQSVGSDLAWYQQNPGQAPRLLIYGTSTRATGIPARFSGSGSGTDFTLTISSLQSEDFAVYFCQQRGNWPITFGQGTRLEIK

SEQ ID NO: 281 - protein, 124 aa, Artificial Sequence; identical to SEQ ID NO: 7
  Description of Artificial Sequence: Synthetic polypeptide

SEQ ID NO: 282 - protein, 109 aa, Artificial Sequence
  Description of Artificial Sequence: Synthetic polypeptide
QDIQMTQSPGTLSLSPGERATLSCRASQSVGSNFLAWYQQKPGQAPRLLIKGASSRASGIPDRFSGSGSGTDFTLTISRVEPEDFAVYYCQQRSSWPITFGQGTRLDIK

SEQ ID NO: 283 - protein, 124 aa, Artificial Sequence; identical to SEQ ID NO: 7
  Description of Artificial Sequence: Synthetic polypeptide

SEQ ID NO: 284 - protein, 108 aa, Artificial Sequence
  Description of Artificial Sequence: Synthetic polypeptide
QDIQMTQSPGTLSLSPGERATLSCRASQSVNSNLAWYQQKPGQAPRLLIHEASNRATGIPDRFSGSGSERDFTLTISRLEPEDFAMYYCQQRAYWPVSFGGGTKVEIK

SEQ ID NO: 285 - protein, 124 aa, Artificial Sequence; identical to SEQ ID NO: 7
  Description of Artificial Sequence: Synthetic polypeptide

SEQ ID NO: 286 - protein, 108 aa, Artificial Sequence
  Description of Artificial Sequence: Synthetic polypeptide
QDIQMTQSPGTLSLSPGERATLSCRASQSVSRHLAWYQQKPGQAPRLLIYGASNRATGIPARFSGSGSGTDFTLTISSLESEDFAVYYCQQRYNWPITFGQGTRLEIK

SEQ ID NO: 287 - protein, 124 aa, Artificial Sequence; identical to SEQ ID NO: 7
  Description of Artificial Sequence: Synthetic polypeptide

SEQ ID NO: 288 - protein, 108 aa, Artificial Sequence
  Description of Artificial Sequence: Synthetic polypeptide
QDIQMTQSPGTLSLSPGERATLSCRASQSVSSDVAWYQQRPGQAPRLLIYGASARATGVPARFSGSGSGTEFTLTISSLEPEDFAVYYCQQRGNWPITFGQGTRLEIK

SEQ ID NO: 289 - protein, 124 aa, Artificial Sequence; identical to SEQ ID NO: 7
  Description of Artificial Sequence: Synthetic polypeptide

SEQ ID NO: 290 - protein, 108 aa, Artificial Sequence
  Description of Artificial Sequence: Synthetic polypeptide
QDIQMTQSPGTLSLSPGERATLSCRASQSVSSNLAWYQQKPGQAPRLLIYDASYRATGIPARFSGSGSGTDFTLTISSLEPEDYAVYYCQQRGNWPITFGQGTRLEIK

SEQ ID NO: 291 - protein, 124 aa, Artificial Sequence; identical to SEQ ID NO: 7
  Description of Artificial Sequence: Synthetic polypeptide

SEQ ID NO: 292 - protein, 109 aa, Artificial Sequence
  Description of Artificial Sequence: Synthetic polypeptide
QDIQMTQSPGTLSLSPGERATLSCRASQSVSSSHLAWYQQKPGQAPRLLIYGASNRATGIPDRFSGSGSGTDFTLTISSLEPEDFAVYYCQQRRNWPPTFGQGTKLEIK

SEQ ID NO: 293 - protein, 124 aa, Artificial Sequence; identical to SEQ ID NO: 7
  Description of Artificial Sequence: Synthetic polypeptide

SEQ ID NO: 294 - protein, 109 aa, Artificial Sequence
  Description of Artificial Sequence: Synthetic polypeptide
QDIQMTQSPGTLSLSPGERATLSCRASQSVSSSQIAWYQQKPGQAPTILIYGASYRATGIPDRFSGSGSGTDFTLTISSLEPEDFAVYYCQQRSNWPVTFGGGTKVEIK

SEQ ID NO: 295 - protein, 124 aa, Artificial Sequence; identical to SEQ ID NO: 7
  Description of Artificial Sequence: Synthetic polypeptide

SEQ ID NO: 296 - protein, 109 aa, Artificial Sequence
  Description of Artificial Sequence: Synthetic polypeptide
QDIQMTQSPGTLSLSPGERATLSCRASQSVSSSQLAWYQQKPGQAPRLLIYGASNRATAIPARFSGSGSGTDFTLTISSLEPDDSAVYYCQQRSRWPITFGQGTRLEIK

SEQ ID NO: 297 - protein, 124 aa, Artificial Sequence; identical to SEQ ID NO: 7
  Description of Artificial Sequence: Synthetic polypeptide

SEQ ID NO: 298 - protein, 109 aa, Artificial Sequence
  Description of Artificial Sequence: Synthetic polypeptide
QDIQMTQSPGTLSLSPGERATLSCRASQSVSSSQLAWYQQKPGQAPRLLIYGASNRATGIPARFSGSGSGTDFTLTISSLEPEDFAVYYCQQRSNWPVTFGGGTKVEIK

SEQ ID NO: 299 - protein, 124 aa, Artificial Sequence; identical to SEQ ID NO: 7
  Description of Artificial Sequence: Synthetic polypeptide

SEQ ID NO: 300 - protein, 109 aa, Artificial Sequence
  Description of Artificial Sequence: Synthetic polypeptide
QDIQMTQSPGTLSLSPGERATLSCRASQSVSSSQLAWYQQKPGQAPRLLIYGASSRATGIPDRFSGSGSGTDFTLTISRLEPEDFAVYYCQQRGNWPITFGQGTRLEIK

SEQ ID NO: 301 - protein, 124 aa, Artificial Sequence; identical to SEQ ID NO: 7
  Description of Artificial Sequence: Synthetic polypeptide

SEQ ID NO: 302 - protein, 109 aa, Artificial Sequence
  Description of Artificial Sequence: Synthetic polypeptide
QDIQMTQSPGTLSLSPGERATLSCRASQSVSSSQLAWYQQKPGQAPSLLIYGASNRATGIPDRFSGSGSGTDFTLTISSLEPEDFAVYYCQQRSNWPVTFGQGTRLEIK

SEQ ID NO: 303 - protein, 124 aa, Artificial Sequence; identical to SEQ ID NO: 7
  Description of Artificial Sequence: Synthetic polypeptide

SEQ ID NO: 304 - protein, 109 aa, Artificial Sequence
  Description of Artificial Sequence: Synthetic polypeptide
QDIQMTQSPGTLSLSPGERATLSCRASQSVSSSYLAWYQQKPGQAPRLLIYDASSRATGIPDRFSGSGSGTDFTLTISSLEPEDFAVYYCQQRHTWPITFGQGTRLEIK

SEQ ID NO: 305 - protein, 124 aa, Artificial Sequence; identical to SEQ ID NO: 7
  Description of Artificial Sequence: Synthetic polypeptide

SEQ ID NO: 306 - protein, 108 aa, Artificial Sequence
  Description of Artificial Sequence: Synthetic polypeptide
QDIQMTQSPGTLSLSPGERGTLSCRASQSVDNHLAWYQHKPGQAPRLLIYGASTRATGIPARFSGSGSGTDFTLTISSLEPEDFAVYYCQQRRKWPVTFGGGTKVEIK

SEQ ID NO: 307 - protein, 124 aa, Artificial Sequence; identical to SEQ ID NO: 7
  Description of Artificial Sequence: Synthetic polypeptide

SEQ ID NO: 308 - protein, 108 aa, Artificial Sequence
  Description of Artificial Sequence: Synthetic polypeptide
QDIQMTQSPGTLSLSPGETATLSCRASQPVGSYLAWYQQKPGQAPRLLIYGASNRATGIPARFSGSGSGTDFTLAISSLEPEDFAVYYCQQRSNWPITFGQGTRLEIK

SEQ ID NO: 309 - protein, 124 aa, Artificial Sequence; identical to SEQ ID NO: 7
  Description of Artificial Sequence: Synthetic polypeptide

SEQ ID NO: 310 - protein, 109 aa, Artificial Sequence
  Description of Artificial Sequence: Synthetic polypeptide
QDIQMTQSPGTLSLSPGETATLSCRASQSLGRSDLAWYQQLPGQAPRLLIFGVSNRATGIPARFSGSGSGTDFTLTISSLEPEDFAIYYCQQRSNWPVTFGPGTKVDFR

SEQ ID NO: 311 - protein, 124 aa, Artificial Sequence; identical to SEQ ID NO: 7
  Description of Artificial Sequence: Synthetic polypeptide

SEQ ID NO: 312 - protein, 108 aa, Artificial Sequence
  Description of Artificial Sequence: Synthetic polypeptide
QDIQMTQSPGTLSLSPGETATLSCRASQSVSLYLAWYQQKPGQAPRLLIYGASSRATGIPDRFSGSGSGTDFTLTISRLEPEDFAVYYCQQRGSWPITFGQGTRLEIK

SEQ ID NO: 313 - protein, 124 aa, Artificial Sequence; identical to SEQ ID NO: 7
  Description of Artificial Sequence: Synthetic polypeptide

SEQ ID NO: 314 - protein, 108 aa, Artificial Sequence
  Description of Artificial Sequence: Synthetic polypeptide
QDIQMTQSPGTLSVSPGERATLSCRASQDVNRYLAWYQQKPGQPPRLLIYGASTRATGIPARFSGSGSGTDFTLTISSLEPEDFAVYYCQQRSNWPITFGQGTRLEIK

SEQ ID NO: 315 - protein, 124 aa, Artificial Sequence; identical to SEQ ID NO: 7
  Description of Artificial Sequence: Synthetic polypeptide

SEQ ID NO: 316 - protein, 108 aa, Artificial Sequence
  Description of Artificial Sequence: Synthetic polypeptide
QDIQMTQSPGTLSVSPGERATLSCRASQSLNSDLAWYQQKPGQAPRLLIYGASTRATGVPDRFTGSGSGTDFTLTISSLQSEDLAVYYCQQRRNWPITFGQGTRLEIK

SEQ ID NO: 317 - protein, 124 aa, Artificial Sequence; identical to SEQ ID NO: 7
  Description of Artificial Sequence: Synthetic polypeptide

SEQ ID NO: 318 - protein, 108 aa, Artificial Sequence
  Description of Artificial Sequence: Synthetic polypeptide
QDIQMTQSPGTLSVSPGERATLSCRASQSVGSDLAWYQQKPGQAPRLLIYGASTRAIGIPARFSGSGSGTDFTLTISSLEPEDFAVYFCQQRGNWPITFGQGTRLEIK

SEQ ID NO: 319 - protein, 124 aa, Artificial Sequence; identical to SEQ ID NO: 7
  Description of Artificial Sequence: Synthetic polypeptide

SEQ ID NO: 320 - protein, 108 aa, Artificial Sequence
  Description of Artificial Sequence: Synthetic polypeptide
QDIQMTQSPGTLSVSPGERATLSCRASQSVSSNLAWYQQKPGQAPRLLIYGASTRATGIPARFSGSGSGTDFTLTISSLEPEDFAVYFCQQRGFWPITFGQGTRLEIK

SEQ ID NO: 321 - protein, 124 aa, Artificial Sequence; identical to SEQ ID NO: 7
  Description of Artificial Sequence: Synthetic polypeptide

SEQ ID NO: 322-323 - skipped (2 entries)

SEQ ID NO: 324 - protein, 109 aa, Artificial Sequence
  Description of Artificial Sequence: Synthetic polypeptide
QDIQMTQSPGTMSLSPGEGATLSCRASQTVSSRLLAWYQKKPAQAPRLLMYAASIRATGIPDRFSGSGSGTDFTLTISRLEPEDFAVYFCQQRRSWPPTFGQGTKVEIK

SEQ ID NO: 325 - protein, 124 aa, Artificial Sequence; identical to SEQ ID NO: 7
  Description of Artificial Sequence: Synthetic polypeptide

SEQ ID NO: 326 - protein, 108 aa, Artificial Sequence
  Description of Artificial Sequence: Synthetic polypeptide
QDIQMTQSPSFLSASLGDRVTITCRATQGIGTFLAWYQQKAGRAPKLLIYGASTLQSGVPSRFSGSGSGTDFTLTISSLEPEDFAVYFCQQRGNWPITFGQGTRLEIK

SEQ ID NO: 327 - protein, 124 aa, Artificial Sequence; identical to SEQ ID NO: 7
  Description of Artificial Sequence: Synthetic polypeptide

SEQ ID NO: 328 - protein, 108 aa, Artificial Sequence
  Description of Artificial Sequence: Synthetic polypeptide
QDIQMTQSPSFLSASLGDRVTITCRATQGIGTFLAWYQQKAGRAPKLLIYGASTLQSGVPSRFSGSGSGTEFTLTISSLQPEDFATYYCQQRGNWPITFGQGTRLEIK

SEQ ID NO: 329 - protein, 124 aa, Artificial Sequence; identical to SEQ ID NO: 7
  Description of Artificial Sequence: Synthetic polypeptide

SEQ ID NO: 330 - protein, 108 aa, Artificial Sequence
  Description of Artificial Sequence: Synthetic polypeptide
QDIQMTQSPSFLSASVGDRVTITCRASQDISSYLAWYQQKPGKAPKLLIYGASTLQSGVPSRFSGSGSGTEFTLTISSLQPEDFAVYYCQQRGNWPITFGQGTRLEIK

SEQ ID NO: 331 - protein, 124 aa, Artificial Sequence; identical to SEQ ID NO: 7
  Description of Artificial Sequence: Synthetic polypeptide

SEQ ID NO: 332 - protein, 108 aa, Artificial Sequence
  Description of Artificial Sequence: Synthetic polypeptide
QDIQMTQSPSFLSASVGDRVTITCRASQGISSYLAWYQQKPGKAPKLLIYAASTLQSGVPSRFSGSGSGTEFTLTISSLQPEDFATYYCQQRSNWPPSFGPGTKVDIK

SEQ ID NO: 333 - protein, 124 aa, Artificial Sequence; identical to SEQ ID NO: 7
  Description of Artificial Sequence: Synthetic polypeptide

SEQ ID NO: 334 - protein, 108 aa, Artificial Sequence
  Description of Artificial Sequence: Synthetic polypeptide
QDIQMTQSPSSLSASVGDRVTITCRASQGIRNDVGWYQQKPGKAPKLLIYAPSNLQSGVPPRFSGSASGTDFTLTISSLQPEDFATYYCLQDFDFPWTFGQGTKVEIK

SEQ ID NO: 335 - protein, 124 aa, Artificial Sequence; identical to SEQ ID NO: 7
  Description of Artificial Sequence: Synthetic polypeptide

SEQ ID NO: 336 - protein, 108 aa, Artificial Sequence
  Description of Artificial Sequence: Synthetic polypeptide
QDIQMTQSPSSLSLSPGERATLSCRASQSISSFLAWYQQKPGQAPRLLIYDASYRATGIPARFSGSGSGTDFTLTISSLEPEDYAVYYCQQRGNWPITFGQGTRLEIK

SEQ ID NO: 337 - protein, 124 aa, Artificial Sequence; identical to SEQ ID NO: 7
  Description of Artificial Sequence: Synthetic polypeptide

SEQ ID NO: 338 - protein, 108 aa, Artificial Sequence
  Description of Artificial Sequence: Synthetic polypeptide
QDIQMTQSPSSLSVSPGERATLSCRASQSVNSDLAWYQQRPGQAPRLLIYAASTRATGVPARFSGTGSGTEFTLTISSLEPEDFAVYYCQQRRKWPVTFGGGTKVEIK

SEQ ID NO: 339 - protein, 124 aa, Artificial Sequence; identical to SEQ ID NO: 7
  Description of Artificial Sequence: Synthetic polypeptide

SEQ ID NO: 340 - protein, 108 aa, Artificial Sequence
  Description of Artificial Sequence: Synthetic polypeptide
QDIQMTQSPSSVSASVGDRVTITCRASQGISTWLAWYQQKPGQAPRLLIYGASNRATGIPDRFSGSGSGTDFTLTISRLEPEDFAVYFCQQRGNWPITFGQGTRLEIK

SEQ ID NO: 341 - protein, 124 aa, Artificial Sequence; identical to SEQ ID NO: 7
  Description of Artificial Sequence: Synthetic polypeptide

SEQ ID NO: 342 - protein, 107 aa, Artificial Sequence
  Description of Artificial Sequence: Synthetic polypeptide
QDIQMTQSPSTLSASVGDRVNITCRASQTISSWLAWYQQKPGKAPKLLIYKASSLQSGVPSRFSGSGSGTDFTLTISSLQPEDFATYYCQQYSSWYTFGQGTKLEIK

SEQ ID NO: 343 - protein, 124 aa, Artificial Sequence; identical to SEQ ID NO: 7
  Description of Artificial Sequence: Synthetic polypeptide

SEQ ID NO: 344 - protein, 108 aa, Artificial Sequence
  Description of Artificial Sequence: Synthetic polypeptide
QDIQMTQSPSTLSLSPGERATLSCRASQNVHTYLAWYQQKPGQAPRLLISEASNRATGVPARFTGSGSGIDFSLSISSLEPEDFAIYYCQQRGGWPITFGGGTKVEIK

SEQ ID NO: 345 - protein, 124 aa, Artificial Sequence; identical to SEQ ID NO: 7
  Description of Artificial Sequence: Synthetic polypeptide

SEQ ID NO: 346 - protein, 108 aa, Artificial Sequence
  Description of Artificial Sequence: Synthetic polypeptide
QDIQMTQSPVTLSVSPGERATLSCRASQNIGSDLAWYQQQPGQAPRLLIYRASFRATGIPARFSGSGSGTDFTLTISSLEPEDFAVYYCQQRGFWPLTFGAGTKVEIK

SEQ ID NO: 347 - protein, 124 aa, Artificial Sequence; identical to SEQ ID NO: 7
  Description of Artificial Sequence: Synthetic polypeptide

SEQ ID NO: 348 - protein, 108 aa, Artificial Sequence; identical to SEQ ID NO: 10
  Description of Artificial Sequence: Synthetic polypeptide

SEQ ID NO: 349 - protein, 124 aa, Artificial Sequence
  Description of Artificial Sequence: Synthetic polypeptide
EVQLLESGGGLVQPGASLRLSCAASGFTFSTYPMWWVRQAPGKGLEWVSYISSSGGGTYYADSVKGRFTISRDNSKNTLYLQMNSLRAEDTAVYYCAKDRAYGDYVGWNGFDYWGQGTLVTVSS

SEQ ID NO: 350 - protein, 108 aa, Artificial Sequence; identical to SEQ ID NO: 10
  Description of Artificial Sequence: Synthetic polypeptide

SEQ ID NO: 351 - protein, 124 aa, Artificial Sequence
  Description of Artificial Sequence: Synthetic polypeptide
EVQLLESGGGLVQPGGSLRLSCAASGFTFSAYDMIWVRQAPGKGLEWVSYIVPSGGFTDYADSVKGRFTISRDNSKNTLYLQMNSLRAEDTAVYYCAKDRAYGDYVGWNGFDYWGQGTLVTVSS

SEQ ID NO: 352 - protein, 108 aa, Artificial Sequence; identical to SEQ ID NO: 10
  Description of Artificial Sequence: Synthetic polypeptide

SEQ ID NO: 353 - protein, 124 aa, Artificial Sequence
  Description of Artificial Sequence: Synthetic polypeptide
EVQLLESGGGLVQPGGSLRLSCAASGFTFSAYDMWWVRQAPGKGLEWVSVIYPSGGTTFYADSVKGRFTISRDNSKNTLYLQMNSLRAEDTAVYYCAKDRAYGDYVGWNGFDYWGQGTLVTVSS

SEQ ID NO: 354 - protein, 108 aa, Artificial Sequence; identical to SEQ ID NO: 10
  Description of Artificial Sequence: Synthetic polypeptide

SEQ ID NO: 355 - protein, 124 aa, Artificial Sequence
  Description of Artificial Sequence: Synthetic polypeptide
EVQLLESGGGLVQPGGSLRLSCAASGFTFSAYDMWWVRQAPGKGLEWVSVIYSSGGMTLYADSVKGRFTISRDNSKNTLYLQMNSLRAEDTAVYYCAKDRAYGDYVGWNGFDYWGQGTLVTVSS

SEQ ID NO: 356 - protein, 108 aa, Artificial Sequence; identical to SEQ ID NO: 10
  Description of Artificial Sequence: Synthetic polypeptide

SEQ ID NO: 357 - protein, 124 aa, Artificial Sequence
  Description of Artificial Sequence: Synthetic polypeptide
EVQLLESGGGLVQPGGSLRLSCAASGFTFSAYDMWWVRQAPGKGLEWVSYISSSGGFTDYADSVKGRFTISRDNSKNTLYLQMNSLRAEDTAVYYCAKDRAYGDYVGWNGFDYWGQGTLVTVSS

SEQ ID NO: 358 - protein, 108 aa, Artificial Sequence; identical to SEQ ID NO: 10
  Description of Artificial Sequence: Synthetic polypeptide

SEQ ID NO: 359 - protein, 124 aa, Artificial Sequence
  Description of Artificial Sequence: Synthetic polypeptide
EVQLLESGGGLVQPGGSLRLSCAASGFTFSAYEMWWVRQAPGKGLEWVSSIYPSGGYTDYADSVKGRFTISRDNSKNTLYLQMNSLRAEDTAVYYCAKDRAYGDYVGWNGFDYWGQGTLVTVSS

SEQ ID NO: 360 - protein, 108 aa, Artificial Sequence; identical to SEQ ID NO: 10
  Description of Artificial Sequence: Synthetic polypeptide

SEQ ID NO: 361 - protein, 124 aa, Artificial Sequence
  Description of Artificial Sequence: Synthetic polypeptide
EVQLLESGGGLVQPGGSLRLSCAASGFTFSAYEMWWVRQAPGKGLEWVSVIYPSGGGTFYADSVKGRFTISRDNSKNTLYLQMNSLRAEDTAVYYCAKDRAYGDYVGWNGFDYWGQGTLVTVSS

SEQ ID NO: 362 - protein, 108 aa, Artificial Sequence; identical to SEQ ID NO: 10
  Description of Artificial Sequence: Synthetic polypeptide

SEQ ID NO: 363 - protein, 124 aa, Artificial Sequence
  Description of Artificial Sequence: Synthetic polypeptide
EVQLLESGGGLVQPGGSLRLSCAASGFTFSAYMMWWVRQAPGKGLEWVSAISPSGGYTGYADSVKGRFTISRDNSKNTLYLQMNSLRAEDTAVYYCAKDRAYGDYVGWNGFDYWGQGTLVTVSS

SEQ ID NO: 364 - protein, 108 aa, Artificial Sequence; identical to SEQ ID NO: 10
  Description of Artificial Sequence: Synthetic polypeptide

SEQ ID NO: 365 - protein, 124 aa, Artificial Sequence
  Description of Artificial Sequence: Synthetic polypeptide
EVQLLESGGGLVQPGGSLRLSCAASGFTFSAYNMIWVRQAPGKGLEWVSYIVPSGGFTGYADSVKGRFTISRDNSKNTLYLQMNSLRAEDTAVYYCAKDRAYGDYVGWNGFDYWGQGTLVTVSS

SEQ ID NO: 366 - protein, 108 aa, Artificial Sequence; identical to SEQ ID NO: 10
  Description of Artificial Sequence: Synthetic polypeptide

SEQ ID NO: 367 - protein, 124 aa, Artificial Sequence
  Description of Artificial Sequence: Synthetic polypeptide
EVQLLESGGGLVQPGGSLRLSCAASGFTFSAYPMIWVRQAPGKGLEWVSYIVPSGGATFYADSVKGRFTISRDNSKNTLYLQMNSLRAEDTAVYYCAKDRAYGDYVGWNGFDYWGQGTLVTVSS

SEQ ID NO: 368 - protein, 108 aa, Artificial Sequence; identical to SEQ ID NO: 10
  Description of Artificial Sequence: Synthetic polypeptide

SEQ ID NO: 369 - protein, 124 aa, Artificial Sequence
  Description of Artificial Sequence: Synthetic polypeptide
EVQLLESGGGLVQPGGSLRLSCAASGFTFSAYPMMWVRQAPGKGLEWVSYIYPSGGGTFYADSVKGRFTISRDNSKNTLYLQMNSLRAEDTAVYYCAKDRAYGDYVGWNGFDYWGQGTLVTVSS

SEQ ID NO: 370 - protein, 108 aa, Artificial Sequence; identical to SEQ ID NO: 10
  Description of Artificial Sequence: Synthetic polypeptide

SEQ ID NO: 371 - protein, 124 aa, Artificial Sequence
  Description of Artificial Sequence: Synthetic polypeptide
EVQLLESGGGLVQPGGSLRLSCAASGFTFSAYPMWWVRQAPGKGLEWVSYIVPSGGMTYYADSVKGRFTISRDNSKNTLYLQMNSLRAEDTAVYYCAKDRAYGDYVGWNGFDYWGQGTLVTVSS

SEQ ID NO: 372 - protein, 108 aa, Artificial Sequence; identical to SEQ ID NO: 10
  Description of Artificial Sequence: Synthetic polypeptide

SEQ ID NO: 373 - protein, 124 aa, Artificial Sequence
  Description of Artificial Sequence: Synthetic polypeptide
EVQLLESGGGLVQPGGSLRLSCAASGFTFSAYPMWWVRQAPGKGLEWVSYIYPSGGATFYADSVKGRFTISRDNSKNTLYLQMNSLRAEDTAVYYCAKDRAYGDYVGWNGFDYWGQGTLVTVSS

SEQ ID NO: 374 - protein, 108 aa, Artificial Sequence; identical to SEQ ID NO: 10
  Description of Artificial Sequence: Synthetic polypeptide

SEQ ID NO: 375 - protein, 124 aa, Artificial Sequence
  Description of Artificial Sequence: Synthetic polypeptide
EVQLLESGGGLVQPGGSLRLSCAASGFTFSDYAMWWVRQAPGKGLEWVSSIYPSGGATFYADSVKGRFTISRDNSKNTLYLQMNSLRAEDTAVYYCAKDRAYGDYVGWNGFDYWGQGTLVTVSS

SEQ ID NO: 376 - protein, 108 aa, Artificial Sequence; identical to SEQ ID NO: 10
  Description of Artificial Sequence: Synthetic polypeptide

SEQ ID NO: 377 - protein, 124 aa, Artificial Sequence
  Description of Artificial Sequence: Synthetic polypeptide
EVQLLESGGGLVQPGGSLRLSCAASGFTFSDYAMWWVRQAPGKGLEWVSWISPSGGGTLYADSVKGRFTISRDNSKNTLYLQMNSLRAEDTAVYYCAKDRAYGDYVGWNGFDYWGQGTLVTVSS

SEQ ID NO: 378 - protein, 108 aa, Artificial Sequence; identical to SEQ ID NO: 10
  Description of Artificial Sequence: Synthetic polypeptide

SEQ ID NO: 379 - protein, 124 aa, Artificial Sequence
  Description of Artificial Sequence: Synthetic polypeptide
EVQLLESGGGLVQPGGSLRLSCAASGFTFSDYDMFWVRQAPGKGLEWVSGIVSSGGYTGYADSVKGRFTISRDNSKNTLYLQMNSLRAEDTAVYYCAKDRAYGDYVGWNGFDYWGQGTLVTVSS

SEQ ID NO: 380 - protein, 108 aa, Artificial Sequence; identical to SEQ ID NO: 10
  Description of Artificial Sequence: Synthetic polypeptide

SEQ ID NO: 381 - protein, 124 aa, Artificial Sequence
  Description of Artificial Sequence: Synthetic polypeptide
EVQLLESGGGLVQPGGSLRLSCAASGFTFSDYDMWWVRQAPGKGLEWVSVISPSGGYTGYADSVKGRFTISRDNSKNTLYLQMNSLRAEDTAVYYCAKDRAYGDYVGWNGFDYWGQGTLVTVSS

SEQ ID NO: 382 - protein, 108 aa, Artificial Sequence; identical to SEQ ID NO: 10
  Description of Artificial Sequence: Synthetic polypeptide

SEQ ID NO: 383 - protein, 124 aa, Artificial Sequence
  Description of Artificial Sequence: Synthetic polypeptide
EVQLLESGGGLVQPGGSLRLSCAASGFTFSDYDMWWVRQAPGKGLEWVSVIYPSGGFTGYADSVKGRFTISRDNSKNTLYLQMNSLRAEDTAVYYCAKDRAYGDYVGWNGFDYWGQGTLVTVSS

SEQ ID NO: 384 - protein, 108 aa, Artificial Sequence; identical to SEQ ID NO: 10
  Description of Artificial Sequence: Synthetic polypeptide

SEQ ID NO: 385 - protein, 123 aa, Artificial Sequence
  Description of Artificial Sequence: Synthetic polypeptide
EVQLLESGGGLVQPGGSLRLSCAASGFTFSDYDMWWVRQAPGKGLEWVSVIYSGGSTYYADSVKGRFTISRDNSKNTLYLQMNSLRAEDTAVYYCAKDRAYGDYVGWNGFDYWGQGTLVTVSS

SEQ ID NO: 386 - protein, 108 aa, Artificial Sequence; identical to SEQ ID NO: 10
  Description of Artificial Sequence: Synthetic polypeptide

SEQ ID NO: 387 - protein, 124 aa, Artificial Sequence
  Description of Artificial Sequence: Synthetic polypeptide
EVQLLESGGGLVQPGGSLRLSCAASGFTFSDYDMWWVRQAPGKGLEWVSVIYSSGGFTSYADSVKGRFTISRDNSKNTLYLQMNSLRAEDTAVYYCAKDRAYGDYVGWNGFDYWGQGTLVTVSS

SEQ ID NO: 388 - protein, 108 aa, Artificial Sequence; identical to SEQ ID NO: 10
  Description of Artificial Sequence: Synthetic polypeptide

SEQ ID NO: 389 - protein, 124 aa, Artificial Sequence
  Description of Artificial Sequence: Synthetic polypeptide
EVQLLESGGGLVQPGGSLRLSCAASGFTFSDYDMWWVRQAPGKGLEWVSVIYSSGGMTYYADSVKGRFTISRDNSKNTLYLQMNSLRAEDTAVYYCAKDRAYGDYVGWNGFDYWGQGTLVTVSS

SEQ ID NO: 390 - protein, 108 aa, Artificial Sequence; identical to SEQ ID NO: 10
  Description of Artificial Sequence: Synthetic polypeptide

SEQ ID NO: 391 - protein, 124 aa, Artificial Sequence
  Description of Artificial Sequence: Synthetic polypeptide
EVQLLESGGGLVQPGGSLRLSCAASGFTFSDYMMWWVRQAPGKGLEWVSSISPSGGFTDYADSVKGRFTISRDNSKNTLYLQMNSLRAEDTAVYYCAKDRAYGDYVGWNGFDYWGQGTLVTVSS

SEQ ID NO: 392 - protein, 108 aa, Artificial Sequence; identical to SEQ ID NO: 10
  Description of Artificial Sequence: Synthetic polypeptide

SEQ ID NO: 393 - protein, 124 aa, Artificial Sequence
  Description of Artificial Sequence: Synthetic polypeptide
EVQLLESGGGLVQPGGSLRLSCAASGFTFSDYNMWWVRQAPGKGLEWVSVIYPSGGWTMYADSVKGRFTISRDNSKNTLYLQMNSLRAEDTAVYYCAKDRAYGDYVGWNGFDYWGQGTLVTVSS

SEQ ID NO: 394 - protein, 108 aa, Artificial Sequence; identical to SEQ ID NO: 10
  Description of Artificial Sequence: Synthetic polypeptide

SEQ ID NO: 395 - protein, 124 aa, Artificial Sequence
  Description of Artificial Sequence: Synthetic polypeptide
EVQLLESGGGLVQPGGSLRLSCAASGFTFSDYPMFWVRQAPGKGLEWVSYIVPSGGWTDYADSVKGRFTISRDNSKNTLYLQMNSLRAEDTAVYYCAKDRAYGDYVGWNGFDYWGQGTLVTVSS

SEQ ID NO: 396 - protein, 108 aa, Artificial Sequence; identical to SEQ ID NO: 10
  Description of Artificial Sequence: Synthetic polypeptide

SEQ ID NO: 397 - protein, 124 aa, Artificial Sequence
  Description of Artificial Sequence: Synthetic polypeptide
EVQLLESGGGLVQPGGSLRLSCAASGFTFSDYPMFWVRQAPGKGLEWVSYIVPSGGWTSYADSVKGRFTISRDNSKNTLYLQMNSLRAEDTAVYYCAKDRAYGDYVGWNGFDYWGQGTLVTVSS

SEQ ID NO: 398 - protein, 108 aa, Artificial Sequence; identical to SEQ ID NO: 10
  Description of Artificial Sequence: Synthetic polypeptide

SEQ ID NO: 399 - protein, 124 aa, Artificial Sequence
  Description of Artificial Sequence: Synthetic polypeptide
EVQLLESGGGLVQPGGSLRLSCAASGFTFSDYPMIWVRQAPGKGLEWVSYISPSGGYTDYADSVKGRFTISRDNSKNTLYLQMNSLRAEDTAVYYCAKDRAYGDYVGWNGFDYWGQGTLVTVSS

SEQ ID NO: 400 - protein, 108 aa, Artificial Sequence; identical to SEQ ID NO: 10
  Description of Artificial Sequence: Synthetic polypeptide

SEQ ID NO: 401 - protein, 124 aa, Artificial Sequence
  Description of Artificial Sequence: Synthetic polypeptide
EVQLLESGGGLVQPGGSLRLSCAASGFTFSDYPMIWVRQAPGKGLEWVSYIVPSGGWTDYADSVKGRFTISRDNSKNTLYLQMNSLRAEDTAVYYCAKDRAYGDYVGWNGFDYWGQGTLVTVSS

SEQ ID NO: 402 - protein, 108 aa, Artificial Sequence; identical to SEQ ID NO: 10
  Description of Artificial Sequence: Synthetic polypeptide

SEQ ID NO: 403 - protein, 124 aa, Artificial Sequence
  Description of Artificial Sequence: Synthetic polypeptide
EVQLLESGGGLVQPGGSLRLSCAASGFTFSDYPMIWVRQAPGKGLEWVSYIYPSGGGTYYADSVKGRFTISRDNSKNTLYLQMNSLRAEDTAVYYCAKDRAYGDYVGWNGFDYWGQGTLVTVSS

SEQ ID NO: 404 - protein, 108 aa, Artificial Sequence; identical to SEQ ID NO: 10
  Description of Artificial Sequence: Synthetic polypeptide

SEQ ID NO: 405 - protein, 124 aa, Artificial Sequence
  Description of Artificial Sequence: Synthetic polypeptide
EVQLLESGGGLVQPGGSLRLSCAASGFTFSDYPMWWVRQAPGKGLEWVSYISSSGGWTSYADSVKGRFTISRDNSKNTLYLQMNSLRAEDTAVYYCAKDRAYGDYVGWNGFDYWGQGTLVTVSS

SEQ ID NO: 406 - protein, 108 aa, Artificial Sequence; identical to SEQ ID NO: 10
  Description of Artificial Sequence: Synthetic polypeptide

SEQ ID NO: 407 - protein, 124 aa, Artificial Sequence
  Description of Artificial Sequence: Synthetic polypeptide
EVQLLESGGGLVQPGGSLRLSCAASGFTFSDYPMWWVRQAPGKGLEWVSYIYPSGGATYYADSVKGRFTISRDNSKNTLYLQMNSLRAEDTAVYYCAKDRAYGDYVGWNGFDYWGQGTLVTVSS

SEQ ID NO: 408 - protein, 108 aa, Artificial Sequence; identical to SEQ ID NO: 10
  Description of Artificial Sequence: Synthetic polypeptide

SEQ ID NO: 409 - protein, 124 aa, Artificial Sequence
  Description of Artificial Sequence: Synthetic polypeptide
EVQLLESGGGLVQPGGSLRLSCAASGFTFSDYQMWWVRQAPGKGLEWVSVIYPSGGATFYADSVKGRFTISRDNSKNTLYLQMNSLRAEDTAVYYCAKDRAYGDYVGWNGFDYWGQGTLVTVSS

SEQ ID NO: 410 - protein, 108 aa, Artificial Sequence; identical to SEQ ID NO: 10
  Description of Artificial Sequence: Synthetic polypeptide

SEQ ID NO: 411 - protein, 124 aa, Artificial Sequence
  Description of Artificial Sequence: Synthetic polypeptide
EVQLLESGGGLVQPGGSLRLSCAASGFTFSEYDMWWVRQAPGKGLEWVSVIYPSGGPTYYADSVKGRFTISRDNSKNTLYLQMNSLRAEDTAVYYCAKDRAYGDYVGWNGFDYWGQGTLVTVSS

SEQ ID NO: 412 - protein, 108 aa, Artificial Sequence; identical to SEQ ID NO: 10
  Description of Artificial Sequence: Synthetic polypeptide

SEQ ID NO: 413 - protein, 124 aa, Artificial Sequence
  Description of Artificial Sequence: Synthetic polypeptide
EVQLLESGGGLVQPGGSLRLSCAASGFTFSEYDMWWVRQAPGKGLEWVSVIYSSGGYTGYADSVKGRFTISRDNSKNTLYLQMNSLRAEDTAVYYCAKDRAYGDYVGWNGFDYWGQGTLVTVSS

SEQ ID NO: 414 - protein, 108 aa, Artificial Sequence; identical to SEQ ID NO: 10
  Description of Artificial Sequence: Synthetic polypeptide

SEQ ID NO: 415 - protein, 124 aa, Artificial Sequence
  Description of Artificial Sequence: Synthetic polypeptide
EVQLLESGGGLVQPGGSLRLSCAASGFTFSEYEMWWVRQAPGKGLEWVSVIYPSGGYTNYADSVKGRFTISRDNSKNTLYLQMNSLRAEDTAVYYCAKDRAYGDYVGWNGFDYWGQGTLVTVSS

SEQ ID NO: 416 - protein, 108 aa, Artificial Sequence; identical to SEQ ID NO: 10
  Description of Artificial Sequence: Synthetic polypeptide

SEQ ID NO: 417 - protein, 124 aa, Artificial Sequence
  Description of Artificial Sequence: Synthetic polypeptide
EVQLLESGGGLVQPGGSLRLSCAASGFTFSEYNMWWVRQAPGKGLEWVSVIYPSGGPTWYADSVKGRFTISRDNSKNTLYLQMNSLRAEDTAVYYCAKDRAYGDYVGWNGFDYWGQGTLVTVSS

SEQ ID NO: 418 - protein, 108 aa, Artificial Sequence; identical to SEQ ID NO: 10
  Description of Artificial Sequence: Synthetic polypeptide

SEQ ID NO: 419 - protein, 124 aa, Artificial Sequence
  Description of Artificial Sequence: Synthetic polypeptide
EVQLLESGGGLVQPGGSLRLSCAASGFTFSEYPMFWVRQAPGKGLEWVSYISPSGGWTSYADSVKGRFTISRDNSKNTLYLQMNSLRAEDTAVYYCAKDRAYGDYVGWNGFDYWGQGTLVTVSS

SEQ ID NO: 420 - protein, 108 aa, Artificial Sequence; identical to SEQ ID NO: 10
  Description of Artificial Sequence: Synthetic polypeptide

SEQ ID NO: 421 - protein, 124 aa, Artificial Sequence
  Description of Artificial Sequence: Synthetic polypeptide
EVQLLESGGGLVQPGGSLRLSCAASGFTFSEYPMIWVRQAPGKGLEWVSYISPSGGYTGYADSVKGRFTISRDNSKNTLYLQMNSLRAEDTAVYYCAKDRAYGDYVGWNGFDYWGQGTLVTVSS

SEQ ID NO: 422 - protein, 108 aa, Artificial Sequence; identical to SEQ ID NO: 10
  Description of Artificial Sequence: Synthetic polypeptide

SEQ ID NO: 423 - protein, 124 aa, Artificial Sequence
  Description of Artificial Sequence: Synthetic polypeptide
EVQLLESGGGLVQPGGSLRLSCAASGFTFSEYPMWWVRQAPGKGLEWVSSIYPSGGATFYADSVKGRFTISRDNSKNTLYLQMNSLRAEDTAVYYCAKDRAYGDYVGWNGFDYWGQGTLVTVSS

SEQ ID NO: 424 - protein, 108 aa, Artificial Sequence; identical to SEQ ID NO: 10
  Description of Artificial Sequence: Synthetic polypeptide

SEQ ID NO: 425 - protein, 124 aa, Artificial Sequence
  Description of Artificial Sequence: Synthetic polypeptide
EVQLLESGGGLVQPGGSLRLSCAASGFTFSEYWMWWVRQAPGKGLEWVSSISPSGGGTFYADSVKGRFTISRDNSKNTLYLQMNSLRAEDTAVYYCAKDRAYGDYVGWNGFDYWGQGTLVTVSS

SEQ ID NO: 426 - protein, 108 aa, Artificial Sequence; identical to SEQ ID NO: 10
  Description of Artificial Sequence: Synthetic polypeptide

SEQ ID NO: 427 - protein, 124 aa, Artificial Sequence
  Description of Artificial Sequence: Synthetic polypeptide
EVQLLESGGGLVQPGGSLRLSCAASGFTFSFYDMFWVRQAPGKGLEWVSVISSSGGGTFYADSVKGRFTISRDNSKNTLYLQMNSLRAEDTAVYYCAKDRAYGDYVGWNGFDYWGQGTLVTVSS

SEQ ID NO: 428 - protein, 108 aa, Artificial Sequence; identical to SEQ ID NO: 10
  Description of Artificial Sequence: Synthetic polypeptide

SEQ ID NO: 429 - protein, 124 aa, Artificial Sequence
  Description of Artificial Sequence: Synthetic polypeptide
EVQLLESGGGLVQPGGSLRLSCAASGFTFSFYDMLWVRQAPGKGLEWVSYISSSGGFTGYADSVKGRFTISRDNSKNTLYLQMNSLRAEDTAVYYCAKDRAYGDYVGWNGFDYWGQGTLVTVSS

SEQ ID NO: 430 - protein, 108 aa, Artificial Sequence; identical to SEQ ID NO: 10
  Description of Artificial Sequence: Synthetic polypeptide

SEQ ID NO: 431 - protein, 124 aa, Artificial Sequence
  Description of Artificial Sequence: Synthetic polypeptide
EVQLLESGGGLVQPGGSLRLSCAASGFTFSFYDMWWVRQAPGKGLEWVSSIYSSGGATFYADSVKGRFTISRDNSKNTLYLQMNSLRAEDTAVYYCAKDRAYGDYVGWNGFDYWGQGTLVTVSS

SEQ ID NO: 432 - protein, 108 aa, Artificial Sequence; identical to SEQ ID NO: 10
  Description of Artificial Sequence: Synthetic polypeptide

SEQ ID NO: 433 - protein, 124 aa, Artificial Sequence
  Description of Artificial Sequence: Synthetic polypeptide
EVQLLESGGGLVQPGGSLRLSCAASGFTFSFYDMWWVRQAPGKGLEWVSVIYSSGGATFYADSVKGRFTISRDNSKNTLYLQMNSLRAEDTAVYYCAKDRAYGDYVGWNGFDYWGQGTLVTVSS

SEQ ID NO: 434 - protein, 108 aa, Artificial Sequence; identical to SEQ ID NO: 10
  Description of Artificial Sequence: Synthetic polypeptide

SEQ ID NO: 435 - protein, 124 aa, Artificial Sequence
  Description of Artificial Sequence: Synthetic polypeptide
EVQLLESGGGLVQPGGSLRLSCAASGFTFSFYDMWWVRQAPGKGLEWVSVIYSSGGFTDYADSVKGRFTISRDNSKNTLYLQMNSLRAEDTAVYYCAKDRAYGDYVGWNGFDYWGQGTLVTVSS

SEQ ID NO: 436 - protein, 108 aa, Artificial Sequence; identical to SEQ ID NO: 10
  Description of Artificial Sequence: Synthetic polypeptide

SEQ ID NO: 437 - protein, 124 aa, Artificial Sequence
  Description of Artificial Sequence: Synthetic polypeptide
EVQLLESGGGLVQPGGSLRLSCAASGFTFSFYDMWWVRQAPGKGLEWVSYISSSGGGTFYADSVKGRFTISRDNSKNTLYLQMNSLRAEDTAVYYCAKDRAYGDYVGWNGFDYWGQGTLVTVSS

SEQ ID NO: 438 - protein, 108 aa, Artificial Sequence; identical to SEQ ID NO: 10
  Description of Artificial Sequence: Synthetic polypeptide

SEQ ID NO: 439 - protein, 124 aa, Artificial Sequence
  Description of Artificial Sequence: Synthetic polypeptide
EVQLLESGGGLVQPGGSLRLSCAASGFTFSFYDMYWVRQAPGKGLEWVSSIVPSGGATFYADSVKGRFTISRDNSKNTLYLQMNSLRAEDTAVYYCAKDRAYGDYVGWNGFDYWGQGTLVTVSS

SEQ ID NO: 440 - protein, 108 aa, Artificial Sequence; identical to SEQ ID NO: 10
  Description of Artificial Sequence: Synthetic polypeptide

SEQ ID NO: 441 - protein, 124 aa, Artificial Sequence
  Description of Artificial Sequence: Synthetic polypeptide
EVQLLESGGGLVQPGGSLRLSCAASGFTFSFYEMWWVRQAPGKGLEWVSYISPSGGGTYYADSVKGRFTISRDNSKNTLYLQMNSLRAEDTAVYYCAKDRAYGDYVGWNGFDYWGQGTLVTVSS

SEQ ID NO: 442 - protein, 108 aa, Artificial Sequence; identical to SEQ ID NO: 10
  Description of Artificial Sequence: Synthetic polypeptide

SEQ ID NO: 443 - protein, 123 aa, Artificial Sequence
  Description of Artificial Sequence: Synthetic polypeptide
EVQLLESGGGLVQPGGSLRLSCAASGFTFSFYHMIWVRQAPGKGLEWVSYIYSSGGTFYADSVKGRFTISRDNSKNTLYLQMNSLRAEDTAVYYCAKDRAYGDYVGWNGFDYWGQGTLVTVSS

SEQ ID NO: 444 - protein, 108 aa, Artificial Sequence; identical to SEQ ID NO: 10
  Description of Artificial Sequence: Synthetic polypeptide

SEQ ID NO: 445 - protein, 124 aa, Artificial Sequence
  Description of Artificial Sequence: Synthetic polypeptide
EVQLLESGGGLVQPGGSLRLSCAASGFTFSFYMMWWVRQAPGKGLEWVSSISPSGGATFYADSVKGRFTISRDNSKNTLYLQMNSLRAEDTAVYYCAKDRAYGDYVGWNGFDYWGQGTLVTVSS

SEQ ID NO: 446 - protein, 108 aa, Artificial Sequence; identical to SEQ ID NO: 10
  Description of Artificial Sequence: Synthetic polypeptide

SEQ ID NO: 447 - protein, 124 aa, Artificial Sequence
  Description of Artificial Sequence: Synthetic polypeptide
EVQLLESGGGLVQPGGSLRLSCAASGFTFSFYNMWWVRQAPGKGLEWVSSISPSGGGTFYADSVKGRFTISRDNSKNTLYLQMNSLRAEDTAVYYCAKDRAYGDYVGWNGFDYWGQGTLVTVSS

SEQ ID NO: 448 - protein, 108 aa, Artificial Sequence; identical to SEQ ID NO: 10
  Description of Artificial Sequence: Synthetic polypeptide

SEQ ID NO: 449 - protein, 124 aa, Artificial Sequence
  Description of Artificial Sequence: Synthetic polypeptide
EVQLLESGGGLVQPGGSLRLSCAASGFTFSFYNMWWVRQAPGKGLEWVSVIYPSGGKTYYADSVKGRFTISRDNSKNTLYLQMNSLRAEDTAVYYCAKDRAYGDYVGWNGFDYWGQGTLVTVSS

SEQ ID NO: 450 - protein, 108 aa, Artificial Sequence; identical to SEQ ID NO: 10
  Description of Artificial Sequence: Synthetic polypeptide

SEQ ID NO: 451 - protein, 124 aa, Artificial Sequence
  Description of Artificial Sequence: Synthetic polypeptide
EVQLLESGGGLVQPGGSLRLSCAASGFTFSFYNMWWVRQAPGKGLEWVSVIYPSGGPTFYADSVKGRFTISRDNSKNTLYLQMNSLRAEDTAVYYCAKDRAYGDYVGWNGFDYWGQGTLVTVSS

SEQ ID NO: 452 - protein, 108 aa, Artificial Sequence; identical to SEQ ID NO: 10
  Description of Artificial Sequence: Synthetic polypeptide

SEQ ID NO: 453 - protein, 124 aa, Artificial Sequence
  Description of Artificial Sequence: Synthetic polypeptide
EVQLLESGGGLVQPGGSLRLSCAASGFTFSFYPMIWVRQAPGKGLEWVSYISPSGGSTLYADSVKGRFTISRDNSKNTLYLQMNSLRAEDTAVYYCAKDRAYGDYVGWNGFDYWGQGTLVTVSS

SEQ ID NO: 454 - protein, 108 aa, Artificial Sequence; identical to SEQ ID NO: 10
  Description of Artificial Sequence: Synthetic polypeptide

SEQ ID NO: 455 - protein, 124 aa, Artificial Sequence
  Description of Artificial Sequence: Synthetic polypeptide
EVQLLESGGGLVQPGGSLRLSCAASGFTFSFYPMIWVRQAPGKGLEWVSYISSSGGFTDYADSVKGRFTISRDNSKNTLYLQMNSLRAEDTAVYYCAKDRAYGDYVGWNGFDYWGQGTLVTVSS

SEQ ID NO: 456 - protein, 108 aa, Artificial Sequence; identical to SEQ ID NO: 10
  Description of Artificial Sequence: Synthetic polypeptide

SEQ ID NO: 457 - protein, 124 aa, Artificial Sequence
  Description of Artificial Sequence: Synthetic polypeptide
EVQLLESGGGLVQPGGSLRLSCAASGFTFSFYPMIWVRQAPGKGLEWVSYISSSGGYTSYADSVKGRFTISRDNSKNTLYLQMNSLRAEDTAVYYCAKDRAYGDYVGWNGFDYWGQGTLVTVSS

SEQ ID NO: 458 - protein, 108 aa, Artificial Sequence; identical to SEQ ID NO: 10
  Description of Artificial Sequence: Synthetic polypeptide

SEQ ID NO: 459 - protein, 122 aa, Artificial Sequence
  Description of Artificial Sequence: Synthetic polypeptide
EVQLLESGGGLVQPGGSLRLSCAASGFTFSFYPMLWVRQAPGKGLEWVSYISGGYTGYADSVKGRFTISRDNSKNTLYLQMNSLRAEDTAVYYCAKDRAYGDYVGWNGFDYWGQGTLVTVSS

SEQ ID NO: 460 - protein, 108 aa, Artificial Sequence; identical to SEQ ID NO: 10
  Description of Artificial Sequence: Synthetic polypeptide

SEQ ID NO: 461 - protein, 124 aa, Artificial Sequence
  Description of Artificial Sequence: Synthetic polypeptide
EVQLLESGGGLVQPGGSLRLSCAASGFTFSFYPMMWVRQAPGKGLEWVSYISFSGGYTGYADSVKGRFTISRDNSKNTLYLQMNSLRAEDTAVYYCAKDRAYGDYVGWNGFDYWGQGTLVTVSS

SEQ ID NO: 462 - protein, 108 aa, Artificial Sequence; identical to SEQ ID NO: 10
  Description of Artificial Sequence: Synthetic polypeptide

SEQ ID NO: 463 - protein, 124 aa, Artificial Sequence
  Description of Artificial Sequence: Synthetic polypeptide
EVQLLESGGGLVQPGGSLRLSCAASGFTFSFYPMWWVRQAPGKGLEWVSYIYPSGGATFYADSVKGRFTISRDNSKNTLYLQMNSLRAEDTAVYYCAKDRAYGDYVGWNGFDYWGQGTLVTVSS

SEQ ID NO: 464 - protein, 108 aa, Artificial Sequence; identical to SEQ ID NO: 10
  Description of Artificial Sequence: Synthetic polypeptide

SEQ ID NO: 465 - protein, 124 aa, Artificial Sequence
  Description of Artificial Sequence: Synthetic polypeptide
EVQLLESGGGLVQPGGSLRLSCAASGFTFSGYDMWWVRQAPGKGLEWVSVISPSGGGTFYADSVKGRFTISRDNSKNTLYLQMNSLRAEDTAVYYCAKDRAYGDYVGWNGFDYWGQGTLVTVSS

SEQ ID NO: 466 - protein, 108 aa, Artificial Sequence; identical to SEQ ID NO: 10
  Description of Artificial Sequence: Synthetic polypeptide

SEQ ID NO: 467 - protein, 124 aa, Artificial Sequence
  Description of Artificial Sequence: Synthetic polypeptide
EVQLLESGGGLVQPGGSLRLSCAASGFTFSGYDMWWVRQAPGKGLEWVSVIYSSGGTTFYADSVKGRFTISRDNSKNTLYLQMNSLRAEDTAVYYCAKDRAYGDYVGWNGFDYWGQGTLVTVSS

SEQ ID NO: 468 - protein, 108 aa, Artificial Sequence; identical to SEQ ID NO: 10
  Description of Artificial Sequence: Synthetic polypeptide

SEQ ID NO: 469 - protein, 124 aa, Artificial Sequence
  Description of Artificial Sequence: Synthetic polypeptide
EVQLLESGGGLVQPGGSLRLSCAASGFTFSGYNMWWVRQAPGKGLEWVSVIYPSGGATFYADSVKGRFTISRDNSKNTLYLQMNSLRAEDTAVYYCAKDRAYGDYVGWNGFDYWGQGTLVTVSS

SEQ ID NO: 470 - protein, 108 aa, Artificial Sequence; identical to SEQ ID NO: 10
  Description of Artificial Sequence: Synthetic polypeptide

SEQ ID NO: 471 - protein, 124 aa, Artificial Sequence
  Description of Artificial Sequence: Synthetic polypeptide
EVQLLESGGGLVQPGGSLRLSCAASGFTFSGYPMWWVRQAPGKGLEWVSYISSSGGGTFYADSVKGRFTISRDNSKNTLYLQMNSLRAEDTAVYYCAKDRAYGDYVGWNGFDYWGQGTLVTVSS

SEQ ID NO: 472 - protein, 108 aa, Artificial Sequence; identical to SEQ ID NO: 10
  Description of Artificial Sequence: Synthetic polypeptide

SEQ ID NO: 473 - protein, 124 aa, Artificial Sequence
  Description of Artificial Sequence: Synthetic polypeptide
EVQLLESGGGLVQPGGSLRLSCAASGFTFSHYAMIWVRQAPGKGLEWVSYIVPSGGWTDYADSVKGRFTISRDNSKNTLYLQMNSLRAEDTAVYYCAKDRAYGDYVGWNGFDYWGQGTLVTVSS

SEQ ID NO: 474 - protein, 108 aa, Artificial Sequence; identical to SEQ ID NO: 10
  Description of Artificial Sequence: Synthetic polypeptide

SEQ ID NO: 475 - protein, 124 aa, Artificial Sequence
  Description of Artificial Sequence: Synthetic polypeptide
EVQLLESGGGLVQPGGSLRLSCAASGFTFSHYAMIWVRQAPGKGLEWVSYIVPSGGWTGYADSVKGRFTISRDNSKNTLYLQMNSLRAEDTAVYYCAKDRAYGDYVGWNGFDYWGQGTLVTVSS

SEQ ID NO: 476 - protein, 108 aa, Artificial Sequence; identical to SEQ ID NO: 10
  Description of Artificial Sequence: Synthetic polypeptide

SEQ ID NO: 477 - protein, 124 aa, Artificial Sequence
  Description of Artificial Sequence: Synthetic polypeptide
EVQLLESGGGLVQPGGSLRLSCAASGFTFSHYDMWWVRQAPGKGLEWVSSISPSGGATFYADSVKGRFTISRDNSKNTLYLQMNSLRAEDTAVYYCAKDRAYGDYVGWNGFDYWGQGTLVTVSS

SEQ ID NO: 478 - protein, 108 aa, Artificial Sequence; identical to SEQ ID NO: 10
  Description of Artificial Sequence: Synthetic polypeptide

SEQ ID NO: 479 - protein, 123 aa, Artificial Sequence
  Description of Artificial Sequence: Synthetic polypeptide
EVQLLESGGGLVQPGGSLRLSCAASGFTFSHYDMWWVRQAPGKGLEWVSVIVSSGKTFYADSVKGRFTISRDNSKNTLYLQMNSLRAEDTAVYYCAKDRAYGDYVGWNGFDYWGQGTLVTVSS

SEQ ID NO: 480 - protein, 108 aa, Artificial Sequence; identical to SEQ ID NO: 10
  Description of Artificial Sequence: Synthetic polypeptide

SEQ ID NO: 481 - protein, 124 aa, Artificial Sequence
  Description of Artificial Sequence: Synthetic polypeptide
EVQLLESGGGLVQPGGSLRLSCAASGFTFSHYDMWWVRQAPGKGLEWVSVIYPSGGFTDYADSVKGRFTISRDNSKNTLYLQMNSLRAEDTAVYYCAKDRAYGDYVGWNGFDYWGQGTLVTVSS

SEQ ID NO: 482 - protein, 108 aa, Artificial Sequence; identical to SEQ ID NO: 10
  Description of Artificial Sequence: Synthetic polypeptide

SEQ ID NO: 483 - protein, 124 aa, Artificial Sequence
  Description of Artificial Sequence: Synthetic polypeptide
EVQLLESGGGLVQPGGSLRLSCAASGFTFSHYDMWWVRQAPGKGLEWVSVIYPSGGHTLYADSVKGRFTISRDNSKNTLYLQMNSLRAEDTAVYYCAKDRAYGDYVGWNGFDYWGQGTLVTVSS

SEQ ID NO: 484 - protein, 108 aa, Artificial Sequence; identical to SEQ ID NO: 10
  Description of Artificial Sequence: Synthetic polypeptide

SEQ ID NO: 485 - protein, 124 aa, Artificial Sequence
  Description of Artificial Sequence: Synthetic polypeptide
EVQLLESGGGLVQPGGSLRLSCAASGFTFSHYDMWWVRQAPGKGLEWVSVIYPSGGPTYYADSVKGRFTISRDNSKNTLYLQMNSLRAEDTAVYYCAKDRAYGDYVGWNGFDYWGQGTLVTVSS

SEQ ID NO: 486 - protein, 108 aa, Artificial Sequence; identical to SEQ ID NO: 10
  Description of Artificial Sequence: Synthetic polypeptide

SEQ ID NO: 487 - protein, 124 aa, Artificial Sequence
  Description of Artificial Sequence: Synthetic polypeptide
EVQLLESGGGLVQPGGSLRLSCAASGFTFSHYDMWWVRQAPGKGLEWVSVIYPSGGVTYYADSVKGRFTISRDNSKNTLYLQMNSLRAEDTAVYYCAKDRAYGDYVGWNGFDYWGQGTLVTVSS

SEQ ID NO: 488 - protein, 108 aa, Artificial Sequence; identical to SEQ ID NO: 10
  Description of Artificial Sequence: Synthetic polypeptide

SEQ ID NO: 489 - protein, 124 aa, Artificial Sequence
  Description of Artificial Sequence: Synthetic polypeptide
EVQLLESGGGLVQPGGSLRLSCAASGFTFSHYDMWWVRQAPGKGLEWVSVIYSSGGFTGYADSVKGRFTISRDNSKNTLYLQMNSLRAEDTAVYYCAKDRAYGDYVGWNGFDYWGQGTLVTVSS

SEQ ID NO: 490 - protein, 108 aa, Artificial Sequence; identical to SEQ ID NO: 10
  Description of Artificial Sequence: Synthetic polypeptide

SEQ ID NO: 491 - protein, 124 aa, Artificial Sequence
  Description of Artificial Sequence: Synthetic polypeptide
EVQLLESGGGLVQPGGSLRLSCAASGFTFSHYDMWWVRQAPGKGLEWVSVIYSSGGPTYYADSVKGRFTISRDNSKNTLYLQMNSLRAEDTAVYYCAKDRAYGDYVGWNGFDYWGQGTLVTVSS

SEQ ID NO: 492 - protein, 108 aa, Artificial Sequence; identical to SEQ ID NO: 10
  Description of Artificial Sequence: Synthetic polypeptide

SEQ ID NO: 493 - protein, 124 aa, Artificial Sequence
  Description of Artificial Sequence: Synthetic polypeptide
EVQLLESGGGLVQPGGSLRLSCAASGFTFSHYDMWWVRQAPGKGLEWVSYISPSGGFTSYADSVKGRFTISRDNSKNTLYLQMNSLRAEDTAVYYCAKDRAYGDYVGWNGFDYWGQGTLVTVSS

SEQ ID NO: 494 - protein, 108 aa, Artificial Sequence; identical to SEQ ID NO: 10
  Description of Artificial Sequence: Synthetic polypeptide

SEQ ID NO: 495 - protein, 124 aa, Artificial Sequence
  Description of Artificial Sequence: Synthetic polypeptide
EVQLLESGGGLVQPGGSLRLSCAASGFTFSHYEMWWVRQAPGKGLEWVSSISSSGGGTFYADSVKGRFTISRDNSKNTLYLQMNSLRAEDTAVYYCAKDRAYGDYVGWNGFDYWGQGTLVTVSS

SEQ ID NO: 496 - protein, 108 aa, Artificial Sequence; identical to SEQ ID NO: 10
  Description of Artificial Sequence: Synthetic polypeptide

SEQ ID NO: 497 - protein, 124 aa, Artificial Sequence
  Description of Artificial Sequence: Synthetic polypeptide
EVQLLESGGGLVQPGGSLRLSCAASGFTFSHYEMWWVRQAPGKGLEWVSYIGSSGGSTYYADSVKGRFTISRDNSKNTLYLQMNSLRAEDTAVYYCAKDRAYGDYVGWNGFDYWGQGTLVTVSS

SEQ ID NO: 498 - protein, 108 aa, Artificial Sequence; identical to SEQ ID NO: 10
  Description of Artificial Sequence: Synthetic polypeptide

SEQ ID NO: 499 - protein, 124 aa, Artificial Sequence
  Description of Artificial Sequence: Synthetic polypeptide
EVQLLESGGGLVQPGGSLRLSCAASGFTFSHYMMIWVRQAPGKGLEWVSGISPSGGYTGYADSVKGRFTISRDNSKNTLYLQMNSLRAEDTAVYYCAKDRAYGDYVGWNGFDYWGQGTLVTVSS

SEQ ID NO: 500 - protein, 108 aa, Artificial Sequence; identical to SEQ ID NO: 10
  Description of Artificial Sequence: Synthetic polypeptide

SEQ ID NO: 501 - protein, 124 aa, Artificial Sequence
  Description of Artificial Sequence: Synthetic polypeptide
EVQLLESGGGLVQPGGSLRLSCAASGFTFSHYMMWWVRQAPGKGLEWVSSIYPSGGGTYYADSVKGRFTISRDNSKNTLYLQMNSLRAEDTAVYYCAKDRAYGDYVGWNGFDYWGQGTLVTVSS

SEQ ID NO: 502 - protein, 108 aa, Artificial Sequence; identical to SEQ ID NO: 10
  Description of Artificial Sequence: Synthetic polypeptide

SEQ ID NO: 503 - protein, 123 aa, Artificial Sequence
  Description of Artificial Sequence: Synthetic polypeptide
EVQLLESGGGLVQPGGSLRLSCAASGFTFSHYMMWWVRQAPGKGLEWVSSIYPSGGTYYADSVKGRFTISRDNSKNTLYLQMNSLRAEDTAVYYCAKDRAYGDYVGWNGFDYWGQGTLVTVSS

SEQ ID NO: 504 - protein, 108 aa, Artificial Sequence; identical to SEQ ID NO: 10
  Description of Artificial Sequence: Synthetic polypeptide

SEQ ID NO: 505 - protein, 124 aa, Artificial Sequence
  Description of Artificial Sequence: Synthetic polypeptide
EVQLLESGGGLVQPGGSLRLSCAASGFTFSHYPMFWVRQAPGKGLEWVSYISSSGGWTDYADSVKGRFTISRDNSKNTLYLQMNSLRAEDTAVYYCAKDRAYGDYVGWNGFDYWGQGTLVTVSS

SEQ ID NO: 506 - protein, 108 aa, Artificial Sequence; identical to SEQ ID NO: 10
  Description of Artificial Sequence: Synthetic polypeptide

SEQ ID NO: 507 - protein, 124 aa, Artificial Sequence
  Description of Artificial Sequence: Synthetic polypeptide
EVQLLESGGGLVQPGGSLRLSCAASGFTFSHYPMIWVRQAPGKGLEWVSYISPSGGGTFYADSVKGRFTISRDNSKNTLYLQMNSLRAEDTAVYYCAKDRAYGDYVGWNGFDYWGQGTLVTVSS

SEQ ID NO: 508 - protein, 108 aa, Artificial Sequence; identical to SEQ ID NO: 10
  Description of Artificial Sequence: Synthetic polypeptide

SEQ ID NO: 509 - protein, 124 aa, Artificial Sequence
  Description of Artificial Sequence: Synthetic polypeptide
EVQLLESGGGLVQPGGSLRLSCAASGFTFSHYPMIWVRQAPGKGLEWVSYISSSGGGTFYADSVKGRFTISRDNSKNTLYLQMNSLRAEDTAVYYCAKDRAYGDYVGWNGFDYWGQGTLVTVSS

SEQ ID NO: 510 - protein, 108 aa, Artificial Sequence; identical to SEQ ID NO: 10
  Description of Artificial Sequence: Synthetic polypeptide

SEQ ID NO: 511 - protein, 124 aa, Artificial Sequence
  Description of Artificial Sequence: Synthetic polypeptide
EVQLLESGGGLVQPGGSLRLSCAASGFTFSHYPMIWVRQAPGKGLEWVSYIYSSGGGTFYADSVKGRFTISRDNSKNTLYLQMNSLRAEDTAVYYCAKDRAYGDYVGWNGFDYWGQGTLVTVSS

SEQ ID NO: 512 - protein, 108 aa, Artificial Sequence; identical to SEQ ID NO: 10
  Description of Artificial Sequence: Synthetic polypeptide

SEQ ID NO: 513 - protein, 124 aa, Artificial Sequence
  Description of Artificial Sequence: Synthetic polypeptide
EVQLLESGGGLVQPGGSLRLSCAASGFTFSHYPMLWVRQAPGKGLEWVSYIYPSGGGTFYADSVKGRFTISRDNSKNTLYLQMNSLRAEDTAVYYCAKDRAYGDYVGWNGFDYWGQGTLVTVSS

SEQ ID NO: 514 - protein, 108 aa, Artificial Sequence; identical to SEQ ID NO: 10
  Description of Artificial Sequence: Synthetic polypeptide

SEQ ID NO: 515 - protein, 124 aa, Artificial Sequence
  Description of Artificial Sequence: Synthetic polypeptide
EVQLLESGGGLVQPGGSLRLSCAASGFTFSHYPMMWVRQAPGKGLEWVSYISSSGGYTGYADSVKGRFTISRDNSKNTLYLQMNSLRAEDTAVYYCAKDRAYGDYVGWNGFDYWGQGTLVTVSS

SEQ ID NO: 516 - protein, 108 aa, Artificial Sequence; identical to SEQ ID NO: 10
  Description of Artificial Sequence: Synthetic polypeptide

SEQ ID NO: 517 - protein, 124 aa, Artificial Sequence
  Description of Artificial Sequence: Synthetic polypeptide
EVQLLESGGGLVQPGGSLRLSCAASGFTFSHYPMMWVRQAPGKGLEWVSYIYSSGGGTYYADSVKGRFTISRDNSKNTLYLQMNSLRAEDTAVYYCAKDRAYGDYVGWNGFDYWGQGTLVTVSS

SEQ ID NO: 518 - protein, 108 aa, Artificial Sequence; identical to SEQ ID NO: 10
  Description of Artificial Sequence: Synthetic polypeptide

SEQ ID NO: 519 - protein, 124 aa, Artificial Sequence
  Description of Artificial Sequence: Synthetic polypeptide
EVQLLESGGGLVQPGGSLRLSCAASGFTFSHYPMVWVRQAPGKGLEWVSYISPSGGYTGYADSVKGRFTISRDNSKNTLYLQMNSLRAEDTAVYYCAKDRAYGDYVGWNGFDYWGQGTLVTVSS

SEQ ID NO: 520 - protein, 108 aa, Artificial Sequence; identical to SEQ ID NO: 10
  Description of Artificial Sequence: Synthetic polypeptide

SEQ ID NO: 521 - protein, 124 aa, Artificial Sequence
  Description of Artificial Sequence: Synthetic polypeptide
EVQLLESGGGLVQPGGSLRLSCAASGFTFSHYPMWWVRQAPGKGLEWVSSISPSGGATFYADSVKGRFTISRDNSKNTLYLQMNSLRAEDTAVYYCAKDRAYGDYVGWNGFDYWGQGTLVTVSS

SEQ ID NO: 522 - protein, 108 aa, Artificial Sequence; identical to SEQ ID NO: 10
  Description of Artificial Sequence: Synthetic polypeptide

SEQ ID NO: 523 - protein, 124 aa, Artificial Sequence
  Description of Artificial Sequence: Synthetic polypeptide
EVQLLESGGGLVQPGGSLRLSCAASGFTFSHYPMWWVRQAPGKGLEWVSVIYSSGGGTFYADSVKGRFTISRDNSKNTLYLQMNSLRAEDTAVYYCAKDRAYGDYVGWNGFDYWGQGTLVTVSS

SEQ ID NO: 524 - protein, 108 aa, Artificial Sequence; identical to SEQ ID NO: 10
  Description of Artificial Sequence: Synthetic polypeptide

SEQ ID NO: 525 - protein, 124 aa, Artificial Sequence
  Description of Artificial Sequence: Synthetic polypeptide
EVQLLESGGGLVQPGGSLRLSCAASGFTFSHYPMWWVRQAPGKGLEWVSWIVPSGGFTLYADSVKGRFTISRDNSKNTLYLQMNSLRAEDTAVYYCAKDRAYGDYVGWNGFDYWGQGTLVTVSS

SEQ ID NO: 526 - protein, 108 aa, Artificial Sequence; identical to SEQ ID NO: 10
  Description of Artificial Sequence: Synthetic polypeptide

SEQ ID NO: 527 - protein, 124 aa, Artificial Sequence
  Description of Artificial Sequence: Synthetic polypeptide
EVQLLESGGGLVQPGGSLRLSCAASGFTFSHYPMWWVRQAPGKGLEWVSYIHPSGGGTLYADSVKGRFTISRDNSKNTLYLQMNSLRAEDTAVYYCAKDRAYGDYVGWNGFDYWGQGTLVTVSS

SEQ ID NO: 528 - protein, 108 aa, Artificial Sequence; identical to SEQ ID NO: 10
  Description of Artificial Sequence: Synthetic polypeptide

SEQ ID NO: 529 - protein, 124 aa, Artificial Sequence
  Description of Artificial Sequence: Synthetic polypeptide
EVQLLESGGGLVQPGGSLRLSCAASGFTFSHYPMWWVRQAPGKGLEWVSYISSSGGGTFYADSVKGRFTISRDNSKNTLYLQMNSLRAEDTAVYYCAKDRAYGDYVGWNGFDYWGQGTLVTVSS

SEQ ID NO: 530 - protein, 108 aa, Artificial Sequence; identical to SEQ ID NO: 10
  Description of Artificial Sequence: Synthetic polypeptide

SEQ ID NO: 531 - protein, 124 aa, Artificial Sequence
  Description of Artificial Sequence: Synthetic polypeptide
EVQLLESGGGLVQPGGSLRLSCAASGFTFSHYPMWWVRQAPGKGLEWVSYIVPSGGATFYADSVKGRFTISRDNSKNTLYLQMNSLRAEDTAVYYCAKDRAYGDYVGWNGFDYWGQGTLVTVSS

SEQ ID NO: 532 - protein, 108 aa, Artificial Sequence; identical to SEQ ID NO: 10
  Description of Artificial Sequence: Synthetic polypeptide

SEQ ID NO: 533 - protein, 124 aa, Artificial Sequence
  Description of Artificial Sequence: Synthetic polypeptide
EVQLLESGGGLVQPGGSLRLSCAASGFTFSHYPMWWVRQAPGKGLEWVSYIYPSGGGTYYADSVKGRFTISRDNSKNTLYLQMNSLRAEDTAVYYCAKDRAYGDYVGWNGFDYWGQGTLVTVSS

SEQ ID NO: 534 - protein, 108 aa, Artificial Sequence; identical to SEQ ID NO: 10
  Description of Artificial Sequence: Synthetic polypeptide

SEQ ID NO: 535 - protein, 124 aa, Artificial Sequence
  Description of Artificial Sequence: Synthetic polypeptide
EVQLLESGGGLVQPGGSLRLSCAASGFTFSHYQMWWVRQAPGKGLEWVSSISSSGGGTYYADSVKGRFTISRDNSKNTLYLQMNSLRAEDTAVYYCAKDRAYGDYVGWNGFDYWGQGTLVTVSS

SEQ ID NO: 536 - protein, 108 aa, Artificial Sequence; identical to SEQ ID NO: 10
  Description of Artificial Sequence: Synthetic polypeptide

SEQ ID NO: 537 - protein, 124 aa, Artificial Sequence
  Description of Artificial Sequence: Synthetic polypeptide
EVQLLESGGGLVQPGGSLRLSCAASGFTFSHYSMMWVRQDPGKGLEWVSYISPSGGYTGYADSVKGRFTISRDNSKNTLYLQMNSLRAEDTAVYYCAKDRAYGDYVGWNGFDYWGQGTLVTVSS

SEQ ID NO: 538 - protein, 108 aa, Artificial Sequence; identical to SEQ ID NO: 10
  Description of Artificial Sequence: Synthetic polypeptide

SEQ ID NO: 539 - protein, 124 aa, Artificial Sequence
  Description of Artificial Sequence: Synthetic polypeptide
EVQLLESGGGLVQPGGSLRLSCAASGFTFSHYSMWWVRQAPGKGLEWVSVIYPSGGATFYADSVKGRFTISRDNSKNTLYLQMNSLRAEDTAVYYCAKDRAYGDYVGWNGFDYWGQGTLVTVSS

SEQ ID NO: 540 - protein, 108 aa, Artificial Sequence; identical to SEQ ID NO: 10
  Description of Artificial Sequence: Synthetic polypeptide

SEQ ID NO: 541 - protein, 124 aa, Artificial Sequence
  Description of Artificial Sequence: Synthetic polypeptide
EVQLLESGGGLVQPGGSLRLSCAASGFTFSIYDMWWVRQAPGKGLEWVSVISPSGGSTYYADSVKGRFTISRDNSKNTLYLQMNSLRAEDTAVYYCAKDRAYGDYVGWNGFDYWGQGTLVTVSS

SEQ ID NO: 542 - protein, 108 aa, Artificial Sequence; identical to SEQ ID NO: 10
  Description of Artificial Sequence: Synthetic polypeptide

SEQ ID NO: 543 - protein, 124 aa, Artificial Sequence
  Description of Artificial Sequence: Synthetic polypeptide
EVQLLESGGGLVQPGGSLRLSCAASGFTFSIYDMWWVRQAPGKGLEWVSVIYPSGGATWYADSVKGRFTISRDNSKNTLYLQMNSLRAEDTAVYYCAKDRAYGDYVGWNGFDYWGQGTLVTVSS

SEQ ID NO: 544 - protein, 108 aa, Artificial Sequence; identical to SEQ ID NO: 10
  Description of Artificial Sequence: Synthetic polypeptide

SEQ ID NO: 545 - protein, 124 aa, Artificial Sequence
  Description of Artificial Sequence: Synthetic polypeptide
EVQLLESGGGLVQPGGSLRLSCAASGFTFSIYDMWWVRQAPGKGLEWVSVIYPSGGPTFYADSVKGRFTISRDNSKNTLYLQMNSLRAEDTAVYYCAKDRAYGDYVGWNGFDYWGQGTLVTVSS

SEQ ID NO: 546 - protein, 108 aa, Artificial Sequence; identical to SEQ ID NO: 10
  Description of Artificial Sequence: Synthetic polypeptide

SEQ ID NO: 547 - protein, 124 aa, Artificial Sequence
  Description of Artificial Sequence: Synthetic polypeptide
EVQLLESGGGLVQPGGSLRLSCAASGFTFSIYDMWWVRQAPGKGLEWVSVIYPSGGVTFYADSVKGRFTISRDNSKNTLYLQMNSLRAEDTAVYYCAKDRAYGDYVGWNGFDYWGQGTLVTVSS

SEQ ID NO: 548 - protein, 108 aa, Artificial Sequence; identical to SEQ ID NO: 10
  Description of Artificial Sequence: Synthetic polypeptide

SEQ ID NO: 549 - protein, 124 aa, Artificial Sequence
  Description of Artificial Sequence: Synthetic polypeptide
EVQLLESGGGLVQPGGSLRLSCAASGFTFSIYDMWWVRQAPGKGLEWVSVIYSSGGFTGYADSVKGRFTISRDNSKNTLYLQMNSLRAEDTAVYYCAKDRAYGDYVGWNGFDYWGQGTLVTVSS

SEQ ID NO: 550 - protein, 108 aa, Artificial Sequence; identical to SEQ ID NO: 10
  Description of Artificial Sequence: Synthetic polypeptide

SEQ ID NO: 551 - protein, 124 aa, Artificial Sequence
  Description of Artificial Sequence: Synthetic polypeptide
EVQLLESGGGLVQPGGSLRLSCAASGFTFSIYPMIWVRQAPGKGLEWVSYISPSGGYTSYADSVKGRFTISRDNSKNTLYLQMNSLRAEDTAVYYCAKDRAYGDYVGWNGFDYWGQGTLVTVSS

SEQ ID NO: 552 - protein, 108 aa, Artificial Sequence; identical to SEQ ID NO: 10
  Description of Artificial Sequence: Synthetic polypeptide

SEQ ID NO: 553 - protein, 124 aa, Artificial Sequence
  Description of Artificial Sequence: Synthetic polypeptide
EVQLLESGGGLVQPGGSLRLSCAASGFTFSIYPMWWVRQAPGKGLEWVSYISPSGGFTSYADSVKGRFTISRDNSKNTLYLQMNSLRAEDTAVYYCAKDRAYGDYVGWNGFDYWGQGTLVTVSS

SEQ ID NO: 554 - protein, 108 aa, Artificial Sequence; identical to SEQ ID NO: 10
  Description of Artificial Sequence: Synthetic polypeptide

SEQ ID NO: 555 - protein, 124 aa, Artificial Sequence
  Description of Artificial Sequence: Synthetic polypeptide
EVQLLESGGGLVQPGGSLRLSCAASGFTFSIYPMWWVRQAPGKGLEWVSYISPSGGGTYYADSVKGRFTISRDNSKNTLYLQMNSLRAEDTAVYYCAKDRAYGDYVGWNGFDYWGQGTLVTVSS

SEQ ID NO: 556 - protein, 108 aa, Artificial Sequence; identical to SEQ ID NO: 10
  Description of Artificial Sequence: Synthetic polypeptide

SEQ ID NO: 557 - protein, 124 aa, Artificial Sequence
  Description of Artificial Sequence: Synthetic polypeptide
EVQLLESGGGLVQPGGSLRLSCAASGFTFSIYPMWWVRQAPGKGLEWVSYISSSGGWTDYADSVKGRFTISRDNSKNTLYLQMNSLRAEDTAVYYCAKDRAYGDYVGWNGFDYWGQGTLVTVSS

SEQ ID NO: 558 - protein, 108 aa, Artificial Sequence; identical to SEQ ID NO: 10
  Description of Artificial Sequence: Synthetic polypeptide

SEQ ID NO: 559 - protein, 124 aa, Artificial Sequence
  Description of Artificial Sequence: Synthetic polypeptide
EVQLLESGGGLVQPGGSLRLSCAASGFTFSIYPMWWVRQAPGKGLEWVSYIVPSGGMTYYADSVKGRFTISRDNSKNTLYLQMNSLRAEDTAVYYCAKDRAYGDYVGWNGFDYWGQGTLVTVSS

SEQ ID NO: 560 - protein, 108 aa, Artificial Sequence; identical to SEQ ID NO: 10
  Description of Artificial Sequence: Synthetic polypeptide

SEQ ID NO: 561 - protein, 124 aa, Artificial Sequence
  Description of Artificial Sequence: Synthetic polypeptide
EVQLLESGGGLVQPGGSLRLSCAASGFTFSIYPMWWVRQAPGKGLEWVSYIYPSGGGTFYADSVKGRFTISRDNSKNTLYLQMNSLRAEDTAVYYCAKDRAYGDYVGWNGFDYWGQGTLVTVSS

SEQ ID NO: 562 - protein, 108 aa, Artificial Sequence; identical to SEQ ID NO: 10
  Description of Artificial Sequence: Synthetic polypeptide

SEQ ID NO: 563 - protein, 124 aa, Artificial Sequence
  Description of Artificial Sequence: Synthetic polypeptide
EVQLLESGGGLVQPGGSLRLSCAASGFTFSKYAMIWVRQAPGKGLEWVSWIPPSGGYTSYADSVKGRFTISRDNSKNTLYLQMNSLRAEDTAVYYCAKDRAYGDYVGWNGFDYWGQGTLVTVSS

SEQ ID NO: 564 - protein, 108 aa, Artificial Sequence; identical to SEQ ID NO: 10
  Description of Artificial Sequence: Synthetic polypeptide

SEQ ID NO: 565 - protein, 124 aa, Artificial Sequence
  Description of Artificial Sequence: Synthetic polypeptide
EVQLLESGGGLVQPGGSLRLSCAASGFTFSKYAMIWVRQAPGKGLEWVSYISPSGGFTGYADSVKGRFTISRDNSKNTLYLQMNSLRAEDTAVYYCAKDRAYGDYVGWNGFDYWGQGTLVTVSS

SEQ ID NO: 566 - protein, 108 aa, Artificial Sequence; identical to SEQ ID NO: 10
  Description of Artificial Sequence: Synthetic polypeptide

SEQ ID NO: 567 - protein, 124 aa, Artificial Sequence
  Description of Artificial Sequence: Synthetic polypeptide
EVQLLESGGGLVQPGGSLRLSCAASGFTFSKYAMIWVRQSPGKGLEWVSYISSSGGFTDYADSVKGRFTISRDNSKNTLYLQMNSLRAEDTAVYYCAKDRAYGDYVGWNGFDYWGQGTLVTVSS

SEQ ID NO: 568 - protein, 108 aa, Artificial Sequence; identical to SEQ ID NO: 10
  Description of Artificial Sequence: Synthetic polypeptide

SEQ ID NO: 569 - protein, 124 aa, Artificial Sequence
  Description of Artificial Sequence: Synthetic polypeptide
EVQLLESGGGLVQPGGSLRLSCAASGFTFSKYAMWWVRQAPGKGLEWVSSISPSGGGTFYADSVKGRFTISRDNSKNTLYLQMNSLRAEDTAVYYCAKDRAYGDYVGWNGFDYWGQGTLVTVSS

SEQ ID NO: 570 - protein, 108 aa, Artificial Sequence; identical to SEQ ID NO: 10
  Description of Artificial Sequence: Synthetic polypeptide

SEQ ID NO: 571 - protein, 124 aa, Artificial Sequence
  Description of Artificial Sequence: Synthetic polypeptide
EVQLLESGGGLVQPGGSLRLSCAASGFTFSKYAMWWVRQAPGKGLEWVSYIVPSGGRTFYADSVKGRFTISRDNSKNTLYLQMNSLRAEDTAVYYCAKDRAYGDYVGWNGFDYWGQGTLVTVSS

SEQ ID NO: 572 - protein, 108 aa, Artificial Sequence; identical to SEQ ID NO: 10
  Description of Artificial Sequence: Synthetic polypeptide

SEQ ID NO: 573 - protein, 124 aa, Artificial Sequence
  Description of Artificial Sequence: Synthetic polypeptide
EVQLLESGGGLVQPGGSLRLSCAASGFTFSKYDMFWVRQAPGKGLEWVSSIVPSGGATYYADSVKGRFTISRDNSKNTLYLQMNSLRAEDTAVYYCAKDRAYGDYVGWNGFDYWGQGTLVTVSS

SEQ ID NO: 574 - protein, 108 aa, Artificial Sequence; identical to SEQ ID NO: 10
  Description of Artificial Sequence: Synthetic polypeptide

SEQ ID NO: 575 - protein, 124 aa, Artificial Sequence
  Description of Artificial Sequence: Synthetic polypeptide
EVQLLESGGGLVQPGGSLRLSCAASGFTFSKYDMIWVRQAPGKGLEWVSWIGPSGGATMYADSVKGRFTISRDNSKNTLYLQMNSLRAEDTAVYYCAKDRAYGDYVGWNGFDYWGQGTLVTVSS

SEQ ID NO: 576 - protein, 108 aa, Artificial Sequence; identical to SEQ ID NO: 10
  Description of Artificial Sequence: Synthetic polypeptide

SEQ ID NO: 577 - protein, 124 aa, Artificial Sequence
  Description of Artificial Sequence: Synthetic polypeptide
EVQLLESGGGLVQPGGSLRLSCAASGFTFSKYDMIWVRQAPGKGLEWVSYIGSSGGYTGYADSVKGRFTISRDNSKNTLYLQMNSLRAEDTAVYYCAKDRAYGDYVGWNGFDYWGQGTLVTVSS

SEQ ID NO: 578 - protein, 108 aa, Artificial Sequence; identical to SEQ ID NO: 10
  Description of Artificial Sequence: Synthetic polypeptide

SEQ ID NO: 579 - protein, 124 aa, Artificial Sequence
  Description of Artificial Sequence: Synthetic polypeptide
EVQLLESGGGLVQPGGSLRLSCAASGFTFSKYDMWWVRQAPGKGLEWVSSISSSGGGTFYADSVKGRFTISRDNSKNTLYLQMNSLRAEDTAVYYCAKDRAYGDYVGWNGFDYWGQGTLVTVSS

SEQ ID NO: 580 - protein, 108 aa, Artificial Sequence; identical to SEQ ID NO: 10
  Description of Artificial Sequence: Synthetic polypeptide

SEQ ID NO: 581 - protein, 124 aa, Artificial Sequence
  Description of Artificial Sequence: Synthetic polypeptide
EVQLLESGGGLVQPGGSLRLSCAASGFTFSKYDMWWVRQAPGKGLEWVSVIYPSGGPTFYADSVKGRFTISRDNSKNTLYLQMNSLRAEDTAVYYCAKDRAYGDYVGWNGFDYWGQGTLVTVSS

SEQ ID NO: 582 - protein, 108 aa, Artificial Sequence; identical to SEQ ID NO: 10
  Description of Artificial Sequence: Synthetic polypeptide

SEQ ID NO: 583 - protein, 124 aa, Artificial Sequence
  Description of Artificial Sequence: Synthetic polypeptide
EVQLLESGGGLVQPGGSLRLSCAASGFTFSKYDMWWVRQAPGKGLEWVSVIYPSGGQTYYADSVKGRFTISRDNSKNTLYLQMNSLRAEDTAVYYCAKDRAYGDYVGWNGFDYWGQGTLVTVSS

SEQ ID NO: 584 - protein, 108 aa, Artificial Sequence; identical to SEQ ID NO: 10
  Description of Artificial Sequence: Synthetic polypeptide

SEQ ID NO: 585 - protein, 124 aa, Artificial Sequence
  Description of Artificial Sequence: Synthetic polypeptide
EVQLLESGGGLVQPGGSLRLSCAASGFTFSKYDMWWVRQAPGKGLEWVSVIYPSGGSTYYADSVKGRFTISRDNSKNTLYLQMNSLRAEDTAVYYCAKDRAYGDYVGWNGFDYWGQGTLVTVSS

SEQ ID NO: 586 - protein, 108 aa, Artificial Sequence; identical to SEQ ID NO: 10
  Description of Artificial Sequence: Synthetic polypeptide

SEQ ID NO: 587 - protein, 124 aa, Artificial Sequence
  Description of Artificial Sequence: Synthetic polypeptide
EVQLLESGGGLVQPGGSLRLSCAASGFTFSKYDMWWVRQAPGKGLEWVSVIYSSGGFTLYADSVKGRFTISRDNSKNTLYLQMNSLRAEDTAVYYCAKDRAYGDYVGWNGFDYWGQGTLVTVSS

SEQ ID NO: 588 - protein, 108 aa, Artificial Sequence; identical to SEQ ID NO: 10
  Description of Artificial Sequence: Synthetic polypeptide

SEQ ID NO: 589 - protein, 124 aa, Artificial Sequence
  Description of Artificial Sequence: Synthetic polypeptide
EVQLLESGGGLVQPGGSLRLSCAASGFTFSKYDMWWVRQAPGKGLEWVSVIYSSGGFTSYADSVKGRFTISRDNSKNTLYLQMNSLRAEDTAVYYCAKDRAYGDYVGWNGFDYWGQGTLVTVSS

SEQ ID NO: 590 - protein, 108 aa, Artificial Sequence; identical to SEQ ID NO: 10
  Description of Artificial Sequence: Synthetic polypeptide

SEQ ID NO: 591 - protein, 124 aa, Artificial Sequence
  Description of Artificial Sequence: Synthetic polypeptide
EVQLLESGGGLVQPGGSLRLSCAASGFTFSKYDMWWVRQAPGKGLEWVSVIYSSGGPTFYADSVKGRFTISRDNSKNTLYLQMNSLRAEDTAVYYCAKDRAYGDYVGWNGFDYWGQGTLVTVSS

SEQ ID NO: 592 - protein, 108 aa, Artificial Sequence; identical to SEQ ID NO: 10
  Description of Artificial Sequence: Synthetic polypeptide

SEQ ID NO: 593 - protein, 124 aa, Artificial Sequence
  Description of Artificial Sequence: Synthetic polypeptide
EVQLLESGGGLVQPGGSLRLSCAASGFTFSKYDMWWVRQAPGKGLEWVSYIGPSGGFTDYADSVKGRFTISRDNSKNTLYLQMNSLRAEDTAVYYCAKDRAYGDYVGWNGFDYWGQGTLVTVSS

SEQ ID NO: 594 - protein, 108 aa, Artificial Sequence; identical to SEQ ID NO: 10
  Description of Artificial Sequence: Synthetic polypeptide

SEQ ID NO: 595 - protein, 124 aa, Artificial Sequence
  Description of Artificial Sequence: Synthetic polypeptide
EVQLLESGGGLVQPGGSLRLSCAASGFTFSKYDMWWVRQAPGKGLEWVSYISSSGGFTDYADSVKGRFTISRDNSKNTLYLQMNSLRAEDTAVYYCAKDRAYGDYVGWNGFDYWGQGTLVTVSS

SEQ ID NO: 596 - protein, 108 aa, Artificial Sequence; identical to SEQ ID NO: 10
  Description of Artificial Sequence: Synthetic polypeptide

SEQ ID NO: 597 - protein, 124 aa, Artificial Sequence
  Description of Artificial Sequence: Synthetic polypeptide
EVQLLESGGGLVQPGGSLRLSCAASGFTFSKYDMWWVRQAPGKGLEWVSYIVPSGGFIDYADSVKGRFTISRDNSKNTLYLQMNSLRAEDTAVYYCAKDRAYGDYVGWNGFDYWGQGTLVTVSS

SEQ ID NO: 598 - protein, 108 aa, Artificial Sequence; identical to SEQ ID NO: 10
  Description of Artificial Sequence: Synthetic polypeptide

SEQ ID NO: 599 - protein, 124 aa, Artificial Sequence
  Description of Artificial Sequence: Synthetic polypeptide
EVQLLESGGGLVQPGGSLRLSCAASGFTFSKYEMFWVRQAPGKGLEWVSSISSSGGGTFYADSVKGRFTISRDNSKNTLYLQMNSLRAEDTAVYYCAKDRAYGDYVGWNGFDYWGQGTLVTVSS

SEQ ID NO: 600 - protein, 108 aa, Artificial Sequence; identical to SEQ ID NO: 10
  Description of Artificial Sequence: Synthetic polypeptide

SEQ ID NO: 601 - protein, 124 aa, Artificial Sequence
  Description of Artificial Sequence: Synthetic polypeptide
EVQLLESGGGLVQPGGSLRLSCAASGFTFSKYEMWWVRQAPGKGLEWVSVIYPSGGMTYYADSVKGRFTISRDNSKNTLYLQMNSLRAEDTAVYYCAKDRAYGDYVGWNGFDYWGQGTLVTVSS

SEQ ID NO: 602 - protein, 108 aa, Artificial Sequence; identical to SEQ ID NO: 10
  Description of Artificial Sequence: Synthetic polypeptide

SEQ ID NO: 603 - protein, 124 aa, Artificial Sequence
  Description of Artificial Sequence: Synthetic polypeptide
EVQLLESGGGLVQPGGSLRLSCAASGFTFSKYEMWWVRQAPGKGLEWVSVIYPSGGYTGYADSVKGRFTISRDNSKNTLYLQMNSLRAEDTAVYYCAKDRAYGDYVGWNGFDYWGQGTLVTVSS

SEQ ID NO: 604 - protein, 108 aa, Artificial Sequence; identical to SEQ ID NO: 10
  Description of Artificial Sequence: Synthetic polypeptide

SEQ ID NO: 605 - protein, 124 aa, Artificial Sequence
  Description of Artificial Sequence: Synthetic polypeptide
EVQLLESGGGLVQPGGSLRLSCAASGFTFSKYEMWWVRQAPGKGLEWVSVIYSSGGKTYYADSVKGRFTISRDNSKNTLYLQMNSLRAEDTAVYYCAKDRAYGDYVGWNGFDYWGQGTLVTVSS

SEQ ID NO: 606 - protein, 108 aa, Artificial Sequence; identical to SEQ ID NO: 10
  Description of Artificial Sequence: Synthetic polypeptide

SEQ ID NO: 607 - protein, 124 aa, Artificial Sequence
  Description of Artificial Sequence: Synthetic polypeptide
EVQLLESGGGLVQPGGSLRLSCAASGFTFSKYEMWWVRQAPGKGLEWVSYIGPSGGFTDYADSVKGRFTISRDNSKNTLYLQMNSLRAEDTAVYYCAKDRAYGDYVGWNGFDYWGQGTLVTVSS

SEQ ID NO: 608 - protein, 108 aa, Artificial Sequence; identical to SEQ ID NO: 10
  Description of Artificial Sequence: Synthetic polypeptide

SEQ ID NO: 609 - protein, 124 aa, Artificial Sequence
  Description of Artificial Sequence: Synthetic polypeptide
EVQLLESGGGLVQPGGSLRLSCAASGFTFSKYEMWWVRQAPGKGLEWVSYIGPSGGITMYADSVKGRFTISRDNSKNTLYLQMNSLRAEDTAVYYCAKDRAYGDYVGWNGFDYWGQGTLVTVSS

SEQ ID NO: 610 - protein, 108 aa, Artificial Sequence; identical to SEQ ID NO: 10
  Description of Artificial Sequence: Synthetic polypeptide

SEQ ID NO: 611 - protein, 124 aa, Artificial Sequence
  Description of Artificial Sequence: Synthetic polypeptide
EVQLLESGGGLVQPGGSLRLSCAASGFTFSKYEMWWVRQAPGKGLEWVSYISPSGGGTLYADSVKGRFTISRDNSKNTLYLQMNSLRAEDTAVYYCAKDRAYGDYVGWNGFDYWGQGTLVTVSS

SEQ ID NO: 612 - protein, 108 aa, Artificial Sequence; identical to SEQ ID NO: 10
  Description of Artificial Sequence: Synthetic polypeptide

SEQ ID NO: 613 - protein, 124 aa, Artificial Sequence
  Description of Artificial Sequence: Synthetic polypeptide
EVQLLESGGGLVQPGGSLRLSCAASGFTFSKYMMFWVRQAPGKGLEWVSSIYSSGGRTFYADSVKGRFTISRDNSKNTLYLQMNSLRAEDTAVYYCAKDRAYGDYVGWNGFDYWGQGTLVTVSS

SEQ ID NO: 614 - protein, 108 aa, Artificial Sequence; identical to SEQ ID NO: 10
  Description of Artificial Sequence: Synthetic polypeptide

SEQ ID NO: 615 - protein, 124 aa, Artificial Sequence
  Description of Artificial Sequence: Synthetic polypeptide
EVQLLESGGGLVQPGGSLRLSCAASGFTFSKYNMWWVRQAPGKGLEWVSSIYPSGGATFYADSVKGRFTISRDNSKNTLYLQMNSLRAEDTAVYYCAKDRAYGDYVGWNGFDYWGQGTLVTVSS

SEQ ID NO: 616 - protein, 108 aa, Artificial Sequence; identical to SEQ ID NO: 10
  Description of Artificial Sequence: Synthetic polypeptide

SEQ ID NO: 617 - protein, 124 aa, Artificial Sequence
  Description of Artificial Sequence: Synthetic polypeptide
EVQLLESGGGLVQPGGSLRLSCAASGFTFSKYNMWWVRQAPGKGLEWVSVIYPSGGATFYADSVKGRFTISRDNSKNTLYLQMNSLRAEDTAVYYCAKDRAYGDYVGWNGFDYWGQGTLVTVSS

SEQ ID NO: 618 - protein, 108 aa, Artificial Sequence; identical to SEQ ID NO: 10
  Description of Artificial Sequence: Synthetic polypeptide

SEQ ID NO: 619 - protein, 124 aa, Artificial Sequence
  Description of Artificial Sequence: Synthetic polypeptide
EVQLLESGGGLVQPGGSLRLSCAASGFTFSKYPMFWVRQAPGKGLEWVSYIVPSGGYTSYADSVKGRFTISRDNSKNTLYLQMNSLRAEDTAVYYCAKDRAYGDYVGWNGFDYWGQGTLVTVSS

SEQ ID NO: 620 - protein, 108 aa, Artificial Sequence; identical to SEQ ID NO: 10
  Description of Artificial Sequence: Synthetic polypeptide

SEQ ID NO: 621 - protein, 124 aa, Artificial Sequence
  Description of Artificial Sequence: Synthetic polypeptide
EVQLLESGGGLVQPGGSLRLSCAASGFTFSKYPMIWVRQAPGKGLEWVSYISPSGGYTGYADSVKGRFTISRDNSKNTLYLQMNSLRAEDTAVYYCAKDRAYGDYVGWNGFDYWGQGTLVTVSS

SEQ ID NO: 622 - protein, 108 aa, Artificial Sequence; identical to SEQ ID NO: 10
  Description of Artificial Sequence: Synthetic polypeptide

SEQ ID NO: 623 - protein, 124 aa, Artificial Sequence
  Description of Artificial Sequence: Synthetic polypeptide
EVQLLESGGGLVQPGGSLRLSCAASGFTFSKYPMIWVRQAPGKGLEWVSYISPSGGYTSYADSVKGRFTISRDNSKNTLYLQMNSLRAEDTAVYYCAKDRAYGDYVGWNGFDYWGQGTLVTVSS

SEQ ID NO: 624 - protein, 108 aa, Artificial Sequence; identical to SEQ ID NO: 10
  Description of Artificial Sequence: Synthetic polypeptide

SEQ ID NO: 625 - protein, 124 aa, Artificial Sequence
  Description of Artificial Sequence: Synthetic polypeptide
EVQLLESGGGLVQPGGSLRLSCAASGFTFSKYPMIWVRQAPGKGLEWVSYISSSGGWTDYADSVKGRFTISRDNSKNTLYLQMNSLRAEDTAVYYCAKDRAYGDYVGWNGFDYWGQGTLVTVSS

SEQ ID NO: 626 - protein, 108 aa, Artificial Sequence; identical to SEQ ID NO: 10
  Description of Artificial Sequence: Synthetic polypeptide

SEQ ID NO: 627 - protein, 124 aa, Artificial Sequence
  Description of Artificial Sequence: Synthetic polypeptide
EVQLLESGGGLVQPGGSLRLSCAASGFTFSKYPMIWVRQAPGKGLEWVSYIYPSGGATYYADSVKGRFTISRDNSKNTLYLQMNSLRAEDTAVYYCAKDRAYGDYVGWNGFDYWGQGTLVTVSS

SEQ ID NO: 628 - protein, 108 aa, Artificial Sequence; identical to SEQ ID NO: 10
  Description of Artificial Sequence: Synthetic polypeptide

SEQ ID NO: 629 - protein, 124 aa, Artificial Sequence
  Description of Artificial Sequence: Synthetic polypeptide
EVQLLESGGGLVQPGGSLRLSCAASGFTFSKYPMIWVRQAPGKGLEWVSYIYPSGGYTSYADSVKGRFTISRDNSKNTLYLQMNSLRAEDTAVYYCAKDRAYGDYVGWNGFDYWGQGTLVTVSS

SEQ ID NO: 630 - protein, 108 aa, Artificial Sequence; identical to SEQ ID NO: 10
  Description of Artificial Sequence: Synthetic polypeptide

SEQ ID NO: 631 - protein, 124 aa, Artificial Sequence
  Description of Artificial Sequence: Synthetic polypeptide
EVQLLESGGGLVQPGGSLRLSCAASGFTFSKYPMIWVRQAPGKGLEWVSYIYSSGGGTYYADSVKGRFTISRDNSKNTLYLQMNSLRAEDTAVYYCAKDRAYGDYVGWNGFDYWGQGTLVTVSS

SEQ ID NO: 632 - protein, 108 aa, Artificial Sequence; identical to SEQ ID NO: 10
  Description of Artificial Sequence: Synthetic polypeptide

SEQ ID NO: 633 - protein, 124 aa, Artificial Sequence
  Description of Artificial Sequence: Synthetic polypeptide
EVQLLESGGGLVQPGGSLRLSCAASGFTFSKYPMMWVRQAPGKGLEWVSYISPSGGFTDYADSVKGRFTISRDNSKNTLYLQMNSLRAEDTAVYYCAKDRAYGDYVGWNGFDYWGQGTLVTVSS

SEQ ID NO: 634 - protein, 108 aa, Artificial Sequence; identical to SEQ ID NO: 10
  Description of Artificial Sequence: Synthetic polypeptide

SEQ ID NO: 635 - protein, 124 aa, Artificial Sequence
  Description of Artificial Sequence: Synthetic polypeptide
EVQLLESGGGLVQPGGSLRLSCAASGFTFSKYPMMWVRQAPGKGLEWVSYIYPSGGYTDYADSVKGRFTISRDNSKNTLYLQMNSLRAEDTAVYYCAKDRAYGDYVGWNGFDYWGQGTLVTVSS

SEQ ID NO: 636 - protein, 108 aa, Artificial Sequence; identical to SEQ ID NO: 10
  Description of Artificial Sequence: Synthetic polypeptide

SEQ ID NO: 637 - protein, 124 aa, Artificial Sequence
  Description of Artificial Sequence: Synthetic polypeptide
EVQLLESGGGLVQPGGSLRLSCAASGFTFSKYPMMWVRQAPGKGLEWVSYIYPSGGYTGYADSVKGRFTISRDNSKNTLYLQMNSLRAEDTAVYYCAKDRAYGDYVGWNGFDYWGQGTLVTVSS

SEQ ID NO: 638 - protein, 108 aa, Artificial Sequence; identical to SEQ ID NO: 10
  Description of Artificial Sequence: Synthetic polypeptide

SEQ ID NO: 639 - protein, 124 aa, Artificial Sequence
  Description of Artificial Sequence: Synthetic polypeptide
EVQLLESGGGLVQPGGSLRLSCAASGFTFSKYPMWWVRQAPGKGLEWVSSIVSSGGATYYTDSVKGRFTISRDNSKNTLYLQMNSLRAEDTAVYYCAKDRAYGDYVGWNGFDYWGQGTLVTVSS

SEQ ID NO: 640 - protein, 108 aa, Artificial Sequence; identical to SEQ ID NO: 10
  Description of Artificial Sequence: Synthetic polypeptide

SEQ ID NO: 641 - protein, 124 aa, Artificial Sequence
  Description of Artificial Sequence: Synthetic polypeptide
EVQLLESGGGLVQPGGSLRLSCAASGFTFSKYPMWWVRQAPGKGLEWVSSIYPSGGYTGYADSVKGRFTISRDNSKNTLYLQMNSLRAEDTAVYYCAKDRAYGDYVGWNGFDYWGQGTLVTVSS

SEQ ID NO: 642 - protein, 108 aa, Artificial Sequence; identical to SEQ ID NO: 10
  Description of Artificial Sequence: Synthetic polypeptide

SEQ ID NO: 643 - protein, 124 aa, Artificial Sequence
  Description of Artificial Sequence: Synthetic polypeptide
EVQLLESGGGLVQPGGSLRLSCAASGFTFSKYPMWWVRQAPGKGLEWVSVISPSGGATYYADSVKGRFTISRDNSKNTLYLQMNSLRAEDTAVYYCAKDRAYGDYVGWNGFDYWGQGTLVTVSS

SEQ ID NO: 644 - protein, 108 aa, Artificial Sequence; identical to SEQ ID NO: 10
  Description of Artificial Sequence: Synthetic polypeptide

SEQ ID NO: 645 - protein, 124 aa, Artificial Sequence
  Description of Artificial Sequence: Synthetic polypeptide
EVQLLESGGGLVQPGGSLRLSCAASGFTFSKYPMWWVRQAPGKGLEWVSVIYPSGGYTAYADSVKGRFTISRDNSKNTLYLQMNSLRAEDTAVYYCAKDRAYGDYVGWNGFDYWGQGTLVTVSS

SEQ ID NO: 646 - protein, 108 aa, Artificial Sequence; identical to SEQ ID NO: 10
  Description of Artificial Sequence: Synthetic polypeptide

SEQ ID NO: 647 - protein, 124 aa, Artificial Sequence
  Description of Artificial Sequence: Synthetic polypeptide
EVQLLESGGGLVQPGGSLRLSCAASGFTFSKYPMWWVRQAPGKGLEWVSVIYSSGGGTFYADSVKGRFTISRDNSKNTLYLQMNSLRAEDTAVYYCAKDRAYGDYVGWNGFDYWGQGTLVTVSS

SEQ ID NO: 648 - protein, 108 aa, Artificial Sequence; identical to SEQ ID NO: 10
  Description of Artificial Sequence: Synthetic polypeptide

SEQ ID NO: 649 - protein, 124 aa, Artificial Sequence
  Description of Artificial Sequence: Synthetic polypeptide
EVQLLESGGGLVQPGGSLRLSCAASGFTFSKYPMWWVRQAPGKGLEWVSYISPSGGGTLYADSVKGRFTISRDNSKNTLYLQMNSLRAEDTAVYYCAKDRAYGDYVGWNGFDYWGQGTLVTVSS

SEQ ID NO: 650 - protein, 108 aa, Artificial Sequence; identical to SEQ ID NO: 10
  Description of Artificial Sequence: Synthetic polypeptide

SEQ ID NO: 651 - protein, 124 aa, Artificial Sequence
  Description of Artificial Sequence: Synthetic polypeptide
EVQLLESGGGLVQPGGSLRLSCAASGFTFSKYPMWWVRQAPGKGLEWVSYISPSGGGTYYADSVKGRFTISRDNSKNTLYLQMNSLRAEDTAVYYCAKDRAYGDYVGWNGFDYWGQGTLVTVSS

SEQ ID NO: 652 - protein, 108 aa, Artificial Sequence; identical to SEQ ID NO: 10
  Description of Artificial Sequence: Synthetic polypeptide

SEQ ID NO: 653 - protein, 124 aa, Artificial Sequence
  Description of Artificial Sequence: Synthetic polypeptide
EVQLLESGGGLVQPGGSLRLSCAASGFTFSKYPMWWVRQAPGKGLEWVSYISSSGGGTYYADSVKGRFTISRDNSKNTLYLQMNSLRAEDTAVYYCAKDRAYGDYVGWNGFDYWGQGTLVTVSS

SEQ ID NO: 654 - protein, 108 aa, Artificial Sequence; identical to SEQ ID NO: 10
  Description of Artificial Sequence: Synthetic polypeptide

SEQ ID NO: 655 - protein, 124 aa, Artificial Sequence
  Description of Artificial Sequence: Synthetic polypeptide
EVQLLESGGGLVQPGGSLRLSCAASGFTFSKYPMWWVRQAPGKGLEWVSYIVPSGGATFYADSVKGRFTISRDNSKNTLYLQMNSLRAEDTAVYYCAKDRAYGDYVGWNGFDYWGQGTLVTVSS

SEQ ID NO: 656 - protein, 108 aa, Artificial Sequence; identical to SEQ ID NO: 10
  Description of Artificial Sequence: Synthetic polypeptide

SEQ ID NO: 657 - protein, 124 aa, Artificial Sequence
  Description of Artificial Sequence: Synthetic polypeptide
EVQLLESGGGLVQPGGSLRLSCAASGFTFSKYPMWWVRQAPGKGLEWVSYIVPSGGPTWYADSVKGRFTISRDNSKNTLYLQMNSLRAEDTAVYYCAKDRAYGDYVGWNGFDYWGQGTLVTVSS

SEQ ID NO: 658 - protein, 108 aa, Artificial Sequence; identical to SEQ ID NO: 10
  Description of Artificial Sequence: Synthetic polypeptide

SEQ ID NO: 659 - protein, 124 aa, Artificial Sequence
  Description of Artificial Sequence: Synthetic polypeptide
EVQLLESGGGLVQPGGSLRLSCAASGFTFSKYPMWWVRQAPGKGLEWVSYIVPSGGWTAYADSVKGRFTISRDNSKNTLYLQMNSLRAEDTAVYYCAKDRAYGDYVGWNGFDYWGQGTLVTVSS

SEQ ID NO: 660 - protein, 108 aa, Artificial Sequence; identical to SEQ ID NO: 10
  Description of Artificial Sequence: Synthetic polypeptide

SEQ ID NO: 661 - protein, 124 aa, Artificial Sequence
  Description of Artificial Sequence: Synthetic polypeptide
EVQLLESGGGLVQPGGSLRLSCAASGFTFSKYQMWWVRQAPGKGLEWVSSIYPSGGATFYADSVKGRFTISRDNSKNTLYLQMNSLRAEDTAVYYCAKDRAYGDYVGWNGFDYWGQGTLVTVSS

SEQ ID NO: 662 - protein, 108 aa, Artificial Sequence; identical to SEQ ID NO: 10
  Description of Artificial Sequence: Synthetic polypeptide

SEQ ID NO: 663 - protein, 124 aa, Artificial Sequence
  Description of Artificial Sequence: Synthetic polypeptide
EVQLLESGGGLVQPGGSLRLSCAASGFTFSKYQMWWVRQAPGKGLEWVSSIYPSGGGTFYADSVKGRFTISRDNSKNTLYLQMNSLRAEDTAVYYCAKDRAYGDYVGWNGFDYWGQGTLVTVSS

SEQ ID NO: 664 - protein, 108 aa, Artificial Sequence; identical to SEQ ID NO: 10
  Description of Artificial Sequence: Synthetic polypeptide

SEQ ID NO: 665 - protein, 124 aa, Artificial Sequence
  Description of Artificial Sequence: Synthetic polypeptide
EVQLLESGGGLVQPGGSLRLSCAASGFTFSKYSMIWVRQAPGKGLEWVSYIVPSGGYTGYADSVKGRFTISRDNSKNTLYLQMNSLRAEDTAVYYCAKDRAYGDYVGWNGFDYWGQGTLVTVSS

SEQ ID NO: 666 - protein, 108 aa, Artificial Sequence; identical to SEQ ID NO: 10
  Description of Artificial Sequence: Synthetic polypeptide

SEQ ID NO: 667 - protein, 124 aa, Artificial Sequence
  Description of Artificial Sequence: Synthetic polypeptide
EVQLLESGGGLVQPGGSLRLSCAASGFTFSKYSMWWVRQAPGKGLEWVSSIYPSGGATFYADSVKGRFTISRDNSKNTLYLQMNSLRAEDTAVYYCAKDRAYGDYVGWNGFDYWGQGTLVTVSS

SEQ ID NO: 668 - protein, 108 aa, Artificial Sequence; identical to SEQ ID NO: 10
  Description of Artificial Sequence: Synthetic polypeptide

SEQ ID NO: 669 - protein, 124 aa, Artificial Sequence
  Description of Artificial Sequence: Synthetic polypeptide
EVQLLESGGGLVQPGGSLRLSCAASGFTFSKYSMWWVRQAPGKGLEWVSVIYPSGGATFYADSVKGRFTISRDNSKNTLYLQMNSLRAEDTAVYYCAKDRAYGDYVGWNGFDYWGQGTLVTVSS

SEQ ID NO: 670 - protein, 108 aa, Artificial Sequence; identical to SEQ ID NO: 10
  Description of Artificial Sequence: Synthetic polypeptide

SEQ ID NO: 671 - protein, 124 aa, Artificial Sequence
  Description of Artificial Sequence: Synthetic polypeptide
EVQLLESGGGLVQPGGSLRLSCAASGFTFSKYSMWWVRQAPGKGLEWVSVIYPSGGFTDYADSVKGRFTISRDNSKNTLYLQMNSLRAEDTAVYYCAKDRAYGDYVGWNGFDYWGQGTLVTVSS

SEQ ID NO: 672 - protein, 108 aa, Artificial Sequence; identical to SEQ ID NO: 10
  Description of Artificial Sequence: Synthetic polypeptide

SEQ ID NO: 673 - protein, 124 aa, Artificial Sequence
  Description of Artificial Sequence: Synthetic polypeptide
EVQLLESGGGLVQPGGSLRLSCAASGFTFSKYTMWWVRQAPGKGLEWVSVIYPSGGATFYADSVKGRFTISRDNSKNTLYLQMNSLRAEDTAVYYCAKDRAYGDYVGWNGFDYWGQGTLVTVSS

SEQ ID NO: 674 - protein, 108 aa, Artificial Sequence; identical to SEQ ID NO: 10
  Description of Artificial Sequence: Synthetic polypeptide

SEQ ID NO: 675 - protein, 124 aa, Artificial Sequence
  Description of Artificial Sequence: Synthetic polypeptide
EVQLLESGGGLVQPGGSLRLSCAASGFTFSKYWMWWVRQAPGKGLEWVSVIVPSGGMTYYADSVKGRFTISRDNSKNTLYLQMNSLRAEDTAVYYCAKDRAYGDYVGWNGFDYWGQGTLVTVSS

SEQ ID NO: 676 - protein, 108 aa, Artificial Sequence; identical to SEQ ID NO: 10
  Description of Artificial Sequence: Synthetic polypeptide

SEQ ID NO: 677 - protein, 124 aa, Artificial Sequence
  Description of Artificial Sequence: Synthetic polypeptide
EVQLLESGGGLVQPGGSLRLSCAASGFTFSKYYMWWVRQAPGKGLEWVSSIYSSGGGTFYADSVKGRFTISRDNSKNTLYLQMNSLRAEDTAVYYCAKDRAYGDYVGWNGFDYWGQGTLVTVSS

SEQ ID NO: 678 - protein, 108 aa, Artificial Sequence; identical to SEQ ID NO: 10
  Description of Artificial Sequence: Synthetic polypeptide

SEQ ID NO: 679 - protein, 124 aa, Artificial Sequence
  Description of Artificial Sequence: Synthetic polypeptide
EVQLLESGGGLVQPGGSLRLSCAASGFTFSLYAMIWVRQAPGKGLEWVSYISPSGGFTGYADSVKGRFTISRDNSKNTLYLQMNSLRAEDTAVYYCAKDRAYGDYVGWNGFDYWGQGTLVTVSS

SEQ ID NO: 680 - protein, 108 aa, Artificial Sequence; identical to SEQ ID NO: 10
  Description of Artificial Sequence: Synthetic polypeptide

SEQ ID NO: 681 - protein, 124 aa, Artificial Sequence
  Description of Artificial Sequence: Synthetic polypeptide
EVQLLESGGGLVQPGGSLRLSCAASGFTFSLYAMWWVRQAPGKGLEWVSSIVPSGGKTYYADSVKGRFTISRDNSKNTLYLQMNSLRAEDTAVYYCAKDRAYGDYVGWNGFDYWGQGTLVTVSS

SEQ ID NO: 682 - protein, 108 aa, Artificial Sequence; identical to SEQ ID NO: 10
  Description of Artificial Sequence: Synthetic polypeptide

SEQ ID NO: 683 - protein, 124 aa, Artificial Sequence
  Description of Artificial Sequence: Synthetic polypeptide
EVQLLESGGGLVQPGGSLRLSCAASGFTFSLYAMWWVRQAPGKGLEWVSYIYPSGGGTYYADSVKGRFTISRDNSKNTLYLQMNSLRAEDTAVYYCAKDRAYGDYVGWNGFDYWGQGTLVTVSS

SEQ ID NO: 684 - protein, 108 aa, Artificial Sequence; identical to SEQ ID NO: 10
  Description of Artificial Sequence: Synthetic polypeptide

SEQ ID NO: 685 - protein, 124 aa, Artificial Sequence
  Description of Artificial Sequence: Synthetic polypeptide
EVQLLESGGGLVQPGGSLRLSCAASGFTFSLYDMLWVRQAPGKGLEWVSYIYPSGGFTGYADSVKGRFTISRDNSKNTLYLQMNSLRAEDTAVYYCAKDRAYGDYVGWNGFDYWGQGTLVTVSS

SEQ ID NO: 686 - protein, 108 aa, Artificial Sequence; identical to SEQ ID NO: 10
  Description of Artificial Sequence: Synthetic polypeptide

SEQ ID NO: 687 - protein, 124 aa, Artificial Sequence
  Description of Artificial Sequence: Synthetic polypeptide
EVQLLESGGGLVQPGGSLRLSCAASGFTFSLYDMVWVRQAPGKGLEWVSWIGPSGGLTIYADSVKGRFTISRDNSKNTLYLQMNSLRAEDTAVYYCAKDRAYGDYVGWNGFDYWGQGTLVTVSS

SEQ ID NO: 688 - protein, 108 aa, Artificial Sequence; identical to SEQ ID NO: 10
  Description of Artificial Sequence: Synthetic polypeptide

SEQ ID NO: 689 - protein, 124 aa, Artificial Sequence
  Description of Artificial Sequence: Synthetic polypeptide
EVQLLESGGGLVQPGGSLRLSCAASGFTFSLYDMWWVRQAPGKGLEWVSSISSSGGYTGYADSVKGRFTISRDNSKNTLYLQMNSLRAEDTAVYYCAKDRAYGDYVGWNGFDYWGQGTLVTVSS

SEQ ID NO: 690 - protein, 108 aa, Artificial Sequence; identical to SEQ ID NO: 10
  Description of Artificial Sequence: Synthetic polypeptide

SEQ ID NO: 691 - protein, 124 aa, Artificial Sequence
  Description of Artificial Sequence: Synthetic polypeptide
EVQLLESGGGLVQPGGSLRLSCAASGFTFSLYDMWWVRQAPGKGLEWVSVIRPSGGSTYYADSVKGRFTISRDNSKNTLYLQMNSLRAEDTAVYYCAKDRAYGDYVGWNGFDYWGQGTLVTVSS

SEQ ID NO: 692 - protein, 108 aa, Artificial Sequence; identical to SEQ ID NO: 10
  Description of Artificial Sequence: Synthetic polypeptide

SEQ ID NO: 693 - protein, 124 aa, Artificial Sequence
  Description of Artificial Sequence: Synthetic polypeptide
EVQLLESGGGLVQPGGSLRLSCAASGFTFSLYDMWWVRQAPGKGLEWVSVIYPSGGPTYYADSVKGRFTISRDNSKNTLYLQMNSLRAEDTAVYYCAKDRAYGDYVGWNGFDYWGQGTLVTVSS

SEQ ID NO: 694 - protein, 108 aa, Artificial Sequence; identical to SEQ ID NO: 10
  Description of Artificial Sequence: Synthetic polypeptide

SEQ ID NO: 695 - protein, 124 aa, Artificial Sequence
  Description of Artificial Sequence: Synthetic polypeptide
EVQLLESGGGLVQPGGSLRLSCAASGFTFSLYDMWWVRQAPGKGLEWVSVIYSSGGATFYADSVKGRFTISRDNSKNTLYLQMNSLRAEDTAVYYCAKDRAYGDYVGWNGFDYWGQGTLVTVSS

SEQ ID NO: 696 - protein, 108 aa, Artificial Sequence; identical to SEQ ID NO: 10
  Description of Artificial Sequence: Synthetic polypeptide

SEQ ID NO: 697 - protein, 124 aa, Artificial Sequence
  Description of Artificial Sequence: Synthetic polypeptide
EVQLLESGGGLVQPGGSLRLSCAASGFTFSLYDMWWVRQAPGKGLEWVSVIYSSGGTTFYADSVKGRFTISRDNSKNTLYLQMNSLRAEDTAVYYCAKDRAYGDYVGWNGFDYWGQGTLVTVSS

SEQ ID NO: 698 - protein, 108 aa, Artificial Sequence; identical to SEQ ID NO: 10
  Description of Artificial Sequence: Synthetic polypeptide

SEQ ID NO: 699 - protein, 124 aa, Artificial Sequence
  Description of Artificial Sequence: Synthetic polypeptide
EVQLLESGGGLVQPGGSLRLSCAASGFTFSLYDMWWVRQAPGKGLEWVSVIYSSGGYTAYADSVKGRFTISRDNSKNTLYLQMNSLRAEDTAVYYCAKDRAYGDYVGWNGFDYWGQGTLVTVSS

SEQ ID NO: 700 - protein, 108 aa, Artificial Sequence; identical to SEQ ID NO: 10
  Description of Artificial Sequence: Synthetic polypeptide

SEQ ID NO: 701 - protein, 124 aa, Artificial Sequence
  Description of Artificial Sequence: Synthetic polypeptide
EVQLLESGGGLVQPGGSLRLSCAASGFTFSLYDMWWVRQAPGKGLEWVSVIYSSGGYTGYADSVKGRFTISRDNSKNTLYLQMNSLRAEDTAVYYCAKDRAYGDYVGWNGFDYWGQGTLVTVSS

SEQ ID NO: 702 - protein, 108 aa, Artificial Sequence; identical to SEQ ID NO: 10
  Description of Artificial Sequence: Synthetic polypeptide

SEQ ID NO: 703 - protein, 124 aa, Artificial Sequence
  Description of Artificial Sequence: Synthetic polypeptide
EVQLLESGGGLVQPGGSLRLSCAASGFTFSLYDMWWVRQAPGKGLEWVSYIGPSGGNTLYADSVKGRFTISRDNSKNTLYLQMNSLRAEDTAVYYCAKDRAYGDYVGWNGFDYWGQGTLVTVSS

SEQ ID NO: 704 - protein, 108 aa, Artificial Sequence; identical to SEQ ID NO: 10
  Description of Artificial Sequence: Synthetic polypeptide

SEQ ID NO: 705 - protein, 124 aa, Artificial Sequence
  Description of Artificial Sequence: Synthetic polypeptide
EVQLLESGGGLVQPGGSLRLSCAASGFTFSLYEMWWVRQAPGKGLEWVSVISPSGGGTYYADSVKGRFTISRDNSKNTLYLQMNSLRAEDTAVYYCAKDRAYGDYVGWNGFDYWGQGTLVTVSS

SEQ ID NO: 706 - protein, 108 aa, Artificial Sequence; identical to SEQ ID NO: 10
  Description of Artificial Sequence: Synthetic polypeptide

SEQ ID NO: 707 - protein, 124 aa, Artificial Sequence
  Description of Artificial Sequence: Synthetic polypeptide
EVQLLESGGGLVQPGGSLRLSCAASGFTFSLYEMWWVRQAPGKGLEWVSYISSSGGGTLYADSVKGRFTISRDNSKNTLYLQMNSLRAEDTAVYYCAKDRAYGDYVGWNGFDYWGQGTLVTVSS

SEQ ID NO: 708 - protein, 108 aa, Artificial Sequence; identical to SEQ ID NO: 10
  Description of Artificial Sequence: Synthetic polypeptide

SEQ ID NO: 709 - protein, 123 aa, Artificial Sequence
  Description of Artificial Sequence: Synthetic polypeptide
EVQLLESGGGLVQPGGSLRLSCAASGFTFSLYMMWWVRKAPGKGLEWVSSIYPSGGTYYADSVKGRFTISRDNSKNTLYLQMNSLRAEDTAVYYCAKDRAYGDYVGWNGFDYWGQGTLVTVSS

SEQ ID NO: 710 - protein, 108 aa, Artificial Sequence; identical to SEQ ID NO: 10
  Description of Artificial Sequence: Synthetic polypeptide

SEQ ID NO: 711 - protein, 124 aa, Artificial Sequence
  Description of Artificial Sequence: Synthetic polypeptide
EVQLLESGGGLVQPGGSLRLSCAASGFTFSLYNMWWVRQAPGKGLEWVSVIYPSGGYTGYADSVKGRFTISRDNSKNTLYLQMNSLRAEDTAVYYCAKDRAYGDYVGWNGFDYWGQGTLVTVSS

SEQ ID NO: 712 - protein, 108 aa, Artificial Sequence; identical to SEQ ID NO: 10
  Description of Artificial Sequence: Synthetic polypeptide

SEQ ID NO: 713 - protein, 124 aa, Artificial Sequence
  Description of Artificial Sequence: Synthetic polypeptide
EVQLLESGGGLVQPGGSLRLSCAASGFTFSLYPMIWVRQAPGKGLEWVSYISPSGGFTDYADSVKGRFTISRDNSKNTLYLQMNSLRAEDTAVYYCAKDRAYGDYVGWNGFDYWGQGTLVTVSS

SEQ ID NO: 714 - protein, 108 aa, Artificial Sequence; identical to SEQ ID NO: 10
  Description of Artificial Sequence: Synthetic polypeptide

SEQ ID NO: 715 - protein, 124 aa, Artificial Sequence
  Description of Artificial Sequence: Synthetic polypeptide
EVQLLESGGGLVQPGGSLRLSCAASGFTFSLYPMMWVRQAPGKGLEWVSYIYPSGGGTFYADSVKGRFTISRDNSKNTLYLQMNSLRAEDTAVYYCAKDRAYGDYVGWNGFDYWGQGTLVTVSS

SEQ ID NO: 716 - protein, 108 aa, Artificial Sequence; identical to SEQ ID NO: 10
  Description of Artificial Sequence: Synthetic polypeptide

SEQ ID NO: 717 - protein, 124 aa, Artificial Sequence
  Description of Artificial Sequence: Synthetic polypeptide
EVQLLESGGGLVQPGGSLRLSCAASGFTFSLYPMWWVRQAPGKGLEWVSSISPSGGATFYADSVKGRFTISRDNSKNTLYLQMNSLRAEDTAVYYCAKDRAYGDYVGWNGFDYWGQGTLVTVSS

SEQ ID NO: 718 - protein, 108 aa, Artificial Sequence; identical to SEQ ID NO: 10
  Description of Artificial Sequence: Synthetic polypeptide

SEQ ID NO: 719 - protein, 124 aa, Artificial Sequence
  Description of Artificial Sequence: Synthetic polypeptide
EVQLLESGGGLVQPGGSLRLSCAASGFTFSLYPMWWVRQAPGKGLEWVSSISPSGGGTFYADSVKGRFTISRDNSKNTLYLQMNSLRAEDTAVYYCAKDRAYGDYVGWNGFDYWGQGTLVTVSS

SEQ ID NO: 720 - protein, 108 aa, Artificial Sequence; identical to SEQ ID NO: 10
  Description of Artificial Sequence: Synthetic polypeptide

SEQ ID NO: 721 - protein, 124 aa, Artificial Sequence
  Description of Artificial Sequence: Synthetic polypeptide
EVQLLESGGGLVQPGGSLRLSCAASGFTFSLYPMWWVRQAPGKGLEWVSSIYPSGGATFYADSVKGRFTISRDNSKNTLYLQMNSLRAEDTAVYYCAKDRAYGDYVGWNGFDYWGQGTLVTVSS

SEQ ID NO: 722 - protein, 108 aa, Artificial Sequence; identical to SEQ ID NO: 10
  Description of Artificial Sequence: Synthetic polypeptide

SEQ ID NO: 723 - protein, 124 aa, Artificial Sequence
  Description of Artificial Sequence: Synthetic polypeptide
EVQLLESGGGLVQPGGSLRLSCAASGFTFSLYPMWWVRQAPGKGLEWVSVIYSSGGATFYADSVKGRFTISRDNSKNTLYLQMNSLRAEDTAVYYCAKDRAYGDYVGWNGFDYWGQGTLVTVSS

SEQ ID NO: 724 - protein, 108 aa, Artificial Sequence; identical to SEQ ID NO: 10
  Description of Artificial Sequence: Synthetic polypeptide

SEQ ID NO: 725 - protein, 124 aa, Artificial Sequence
  Description of Artificial Sequence: Synthetic polypeptide
EVQLLESGGGLVQPGGSLRLSCAASGFTFSLYPMWWVRQAPGKGLEWVSWIVPSGGFTLYADSVKGRFTISRDNSKNTLYLQMNSLRAEDTAVYYCAKDRAYGDYVGWNGFDYWGQGTLVTVSS

SEQ ID NO: 726 - protein, 108 aa, Artificial Sequence; identical to SEQ ID NO: 10
  Description of Artificial Sequence: Synthetic polypeptide

SEQ ID NO: 727 - protein, 124 aa, Artificial Sequence
  Description of Artificial Sequence: Synthetic polypeptide
EVQLLESGGGLVQPGGSLRLSCAASGFTFSLYPMWWVRQAPGKGLEWVSYISPSGGGTLYADSVKGRFTISRDNSKNTLYLQMNSLRAEDTAVYYCAKDRAYGDYVGWNGFDYWGQGTLVTVSS

SEQ ID NO: 728 - protein, 108 aa, Artificial Sequence; identical to SEQ ID NO: 10
  Description of Artificial Sequence: Synthetic polypeptide

SEQ ID NO: 729 - protein, 124 aa, Artificial Sequence
  Description of Artificial Sequence: Synthetic polypeptide
EVQLLESGGGLVQPGGSLRLSCAASGFTFSLYPMWWVRQAPGKGLEWVSYISSSGGGTYYADSVKGRFTISRDNSKNTLYLQMNSLRAEDTAVYYCAKDRAYGDYVGWNGFDYWGQGTLVTVSS

SEQ ID NO: 730 - protein, 108 aa, Artificial Sequence; identical to SEQ ID NO: 10
  Description of Artificial Sequence: Synthetic polypeptide

SEQ ID NO: 731 - protein, 124 aa, Artificial Sequence
  Description of Artificial Sequence: Synthetic polypeptide
EVQLLESGGGLVQPGGSLRLSCAASGFTFSLYPMWWVRQAPGKGLEWVSYIVPSGGGTFYADSVKGRFTISRDNSKNTLYLQMNSLRAEDTAVYYCAKDRAYGDYVGWNGFDYWGQGTLVTVSS

SEQ ID NO: 732 - protein, 108 aa, Artificial Sequence; identical to SEQ ID NO: 10
  Description of Artificial Sequence: Synthetic polypeptide

SEQ ID NO: 733 - protein, 124 aa, Artificial Sequence
  Description of Artificial Sequence: Synthetic polypeptide
EVQLLESGGGLVQPGGSLRLSCAASGFTFSLYPMWWVRQAPGKGLEWVSYIVSSGGATFYADSVKGRFTISRDNSKNTLYLQMNSLRAEDTAVYYCAKDRAYGDYVGWNGFDYWGQGTLVTVSS

SEQ ID NO: 734 - protein, 108 aa, Artificial Sequence; identical to SEQ ID NO: 10
  Description of Artificial Sequence: Synthetic polypeptide

SEQ ID NO: 735 - protein, 124 aa, Artificial Sequence
  Description of Artificial Sequence: Synthetic polypeptide
EVQLLESGGGLVQPGGSLRLSCAASGFTFSLYPMWWVRQAPGKGLEWVSYIYPSGGATMYADSVKGRFTISRDNSKNTLYLQMNSLRAEDTAVYYCAKDRAYGDYVGWNGFDYWGQGTLVTVSS

SEQ ID NO: 736 - protein, 108 aa, Artificial Sequence; identical to SEQ ID NO: 10
  Description of Artificial Sequence: Synthetic polypeptide

SEQ ID NO: 737 - protein, 124 aa, Artificial Sequence
  Description of Artificial Sequence: Synthetic polypeptide
EVQLLESGGGLVQPGGSLRLSCAASGFTFSLYQMWWVRQAPGKGLEWVSVIYPSGGATYYADSVKGRFTISRDNSKNTLYLQMNSLRAEDTAVYYCAKDRAYGDYVGWNGFDYWGQGTLVTVSS

SEQ ID NO: 738 - protein, 108 aa, Artificial Sequence; identical to SEQ ID NO: 10
  Description of Artificial Sequence: Synthetic polypeptide

SEQ ID NO: 739 - protein, 123 aa, Artificial Sequence
  Description of Artificial Sequence: Synthetic polypeptide
EVQLLESGGGLVQPGGSLRLSCAASGFTFSLYQMWWVRQAPGKGLEWVSVIYPSGGTFYADSVKGRFTISRDNSKNTLYLQMNSLRAEDTAVYYCAKDRAYGDYVGWNGFDYWGQGTLVTVSS

SEQ ID NO: 740 - protein, 108 aa, Artificial Sequence; identical to SEQ ID NO: 10
  Description of Artificial Sequence: Synthetic polypeptide

SEQ ID NO: 741 - protein, 124 aa, Artificial Sequence
  Description of Artificial Sequence: Synthetic polypeptide
EVQLLESGGGLVQPGGSLRLSCAASGFTFSMYDMWWVRQAPGKGLEWVSVISPSGGGTFYADSVKGRFTISRDNSKNTLYLQMNSLRAEDTAVYYCAKDRAYGDYVGWNGFDYWGQGTLVTVSS

SEQ ID NO: 742 - protein, 108 aa, Artificial Sequence; identical to SEQ ID NO: 10
  Description of Artificial Sequence: Synthetic polypeptide

SEQ ID NO: 743 - protein, 124 aa, Artificial Sequence
  Description of Artificial Sequence: Synthetic polypeptide
EVQLLESGGGLVQPGGSLRLSCAASGFTFSMYDMWWVRQAPGKGLEWVSVIYPSGGNTLYADSVKGRFTISRDNSKNTLYLQMNSLRAEDTAVYYCAKDRAYGDYVGWNGFDYWGQGTLVTVSS

SEQ ID NO: 744 - protein, 108 aa, Artificial Sequence; identical to SEQ ID NO: 10
  Description of Artificial Sequence: Synthetic polypeptide

SEQ ID NO: 745 - protein, 124 aa, Artificial Sequence
  Description of Artificial Sequence: Synthetic polypeptide
EVQLLESGGGLVQPGGSLRLSCAASGFTFSMYDMWWVRQAPGKGLEWVSVIYPSGGPTFYADSVKGRFTISRDNSKNTLYLQMNSLRAEDTAVYYCAKDRAYGDYVGWNGFDYWGQGTLVTVSS

SEQ ID NO: 746 - protein, 108 aa, Artificial Sequence; identical to SEQ ID NO: 10
  Description of Artificial Sequence: Synthetic polypeptide

SEQ ID NO: 747 - protein, 124 aa, Artificial Sequence
  Description of Artificial Sequence: Synthetic polypeptide
EVQLLESGGGLVQPGGSLRLSCAASGFTFSMYDMWWVRQAPGKGLEWVSVIYPSGGYTAYADSVKGRFTISRDNSKNTLYLQMNSLRAEDTAVYYCAKDRAYGDYVGWNGFDYWGQGTLVTVSS

SEQ ID NO: 748 - protein, 108 aa, Artificial Sequence; identical to SEQ ID NO: 10
  Description of Artificial Sequence: Synthetic polypeptide

SEQ ID NO: 749 - protein, 124 aa, Artificial Sequence
  Description of Artificial Sequence: Synthetic polypeptide
EVQLLESGGGLVQPGGSLRLSCAASGFTFSMYDMWWVRQAPGKGLEWVSVIYSSGGFTDYADSVKGRFTISRDNSKNTLYLQMNSLRAEDTAVYYCAKDRAYGDYVGWNGFDYWGQGTLVTVSS

SEQ ID NO: 750 - protein, 108 aa, Artificial Sequence; identical to SEQ ID NO: 10
  Description of Artificial Sequence: Synthetic polypeptide

SEQ ID NO: 751 - protein, 124 aa, Artificial Sequence
  Description of Artificial Sequence: Synthetic polypeptide
EVQLLESGGGLVQPGGSLRLSCAASGFTFSMYDMWWVRQAPGKGLEWVSVIYSSGGPTFYADSVKGRFTISRDNSKNTLYLQMNSLRAEDTAVYYCAKDRAYGDYVGWNGFDYWGQGTLVTVSS

SEQ ID NO: 752 - protein, 108 aa, Artificial Sequence; identical to SEQ ID NO: 10
  Description of Artificial Sequence: Synthetic polypeptide

SEQ ID NO: 753 - protein, 124 aa, Artificial Sequence
  Description of Artificial Sequence: Synthetic polypeptide
EVQLLESGGGLVQPGGSLRLSCAASGFTFSMYDMWWVRQAPGKGLEWVSVIYSSGGVTFYADSVKGRFTISRDNSKNTLYLQMNSLRAEDTAVYYCAKDRAYGDYVGWNGFDYWGQGTLVTVSS

SEQ ID NO: 754 - protein, 108 aa, Artificial Sequence; identical to SEQ ID NO: 10
  Description of Artificial Sequence: Synthetic polypeptide

SEQ ID NO: 755 - protein, 124 aa, Artificial Sequence
  Description of Artificial Sequence: Synthetic polypeptide
EVQLLESGGGLVQPGGSLRLSCAASGFTFSMYDMWWVRQAPGKGLEWVSVIYSSGGYTAYADSVKGRFTISRDNSKNTLYLQMNSLRAEDTAVYYCAKDRAYGDYVGWNGFDYWGQGTLVTVSS

SEQ ID NO: 756 - protein, 108 aa, Artificial Sequence; identical to SEQ ID NO: 10
  Description of Artificial Sequence: Synthetic polypeptide

SEQ ID NO: 757 - protein, 124 aa, Artificial Sequence
  Description of Artificial Sequence: Synthetic polypeptide
EVQLLESGGGLVQPGGSLRLSCAASGFTFSMYDMWWVRQAPGKGLEWVSVIYSSGGYTDYADSVKGRFTISRDNSKNTLYLQMNSLRAEDTAVYYCAKDRAYGDYVGWNGFDYWGQGTLVTVSS

SEQ ID NO: 758 - protein, 108 aa, Artificial Sequence; identical to SEQ ID NO: 10
  Description of Artificial Sequence: Synthetic polypeptide

SEQ ID NO: 759 - protein, 124 aa, Artificial Sequence
  Description of Artificial Sequence: Synthetic polypeptide
EVQLLESGGGLVQPGGSLRLSCAASGFTFSMYDMWWVRQAPGKGLEWVSVIYSSGGYTNYADSVKGRFTISRDNSKNTLYLQMNSLRAEDTAVYYCAKDRAYGDYVGWNGFDYWGQGTLVTVSS

SEQ ID NO: 760 - protein, 108 aa, Artificial Sequence; identical to SEQ ID NO: 10
  Description of Artificial Sequence: Synthetic polypeptide

SEQ ID NO: 761 - protein, 124 aa, Artificial Sequence
  Description of Artificial Sequence: Synthetic polypeptide
EVQLLESGGGLVQPGGSLRLSCAASGFTFSMYDMWWVRQAPGKGLEWVSVIYSSGGYTSYADSVKGRFTISRDNSKNTLYLQMNSLRAEDTAVYYCAKDRAYGDYVGWNGFDYWGQGTLVTVSS

SEQ ID NO: 762 - protein, 108 aa, Artificial Sequence; identical to SEQ ID NO: 10
  Description of Artificial Sequence: Synthetic polypeptide

SEQ ID NO: 763 - protein, 124 aa, Artificial Sequence
  Description of Artificial Sequence: Synthetic polypeptide
EVQLLESGGGLVQPGGSLRLSCAASGFTFSMYDMWWVRQAPGKGLEWVSYISSSGGSTLYADSVKGRFTISRDNSKNTLYLQMNSLRAEDTAVYYCAKDRAYGDYVGWNGFDYWGQGTLVTVSS

SEQ ID NO: 764 - protein, 108 aa, Artificial Sequence; identical to SEQ ID NO: 10
  Description of Artificial Sequence: Synthetic polypeptide

SEQ ID NO: 765 - protein, 124 aa, Artificial Sequence
  Description of Artificial Sequence: Synthetic polypeptide
EVQLLESGGGLVQPGGSLRLSCAASGFTFSMYMMIWVRQAPGKGLEWVSSIYPSGGFTSYADSVKGRFTISRDNSKNTLYLQMNSLRAEDTAVYYCAKDRAYGDYVGWNGFDYWGQGTLVTVSS

SEQ ID NO: 766 - protein, 108 aa, Artificial Sequence; identical to SEQ ID NO: 10
  Description of Artificial Sequence: Synthetic polypeptide

SEQ ID NO: 767 - protein, 124 aa, Artificial Sequence
  Description of Artificial Sequence: Synthetic polypeptide
EVQLLESGGGLVQPGGSLRLSCAASGFTFSMYNMWWVRQAPGKGLEWVSSISPSGGATYYADSVKGRFTISRDNSKNTLYLQMNSLRAEDTAVYYCAKDRAYGDYVGWNGFDYWGQGTLVTVSS

SEQ ID NO: 768 - protein, 108 aa, Artificial Sequence; identical to SEQ ID NO: 10
  Description of Artificial Sequence: Synthetic polypeptide

SEQ ID NO: 769 - protein, 124 aa, Artificial Sequence
  Description of Artificial Sequence: Synthetic polypeptide
EVQLLESGGGLVQPGGSLRLSCAASGFTFSMYPIIWVRQAPGKGLEWVSYISPSGGFTGYADSVKGRFTISRDNSKNTLYLQMNSLRAEDTAVYYCAKDRAYGDYVGWNGFDYWGQGTLVTVSS

SEQ ID NO: 770 - protein, 108 aa, Artificial Sequence; identical to SEQ ID NO: 10
  Description of Artificial Sequence: Synthetic polypeptide

SEQ ID NO: 771 - protein, 124 aa, Artificial Sequence
  Description of Artificial Sequence: Synthetic polypeptide
EVQLLESGGGLVQPGGSLRLSCAASGFTFSMYPMFWVRQAPGKGLEWVSYISPSGGWTAYADSVKGRFTISRDNSKNTLYLQMNSLRAEDTAVYYCAKDRAYGDYVGWNGFDYWGQGTLVTVSS

SEQ ID NO: 772 - protein, 108 aa, Artificial Sequence; identical to SEQ ID NO: 10
  Description of Artificial Sequence: Synthetic polypeptide

SEQ ID NO: 773 - protein, 124 aa, Artificial Sequence
  Description of Artificial Sequence: Synthetic polypeptide
EVQLLESGGGLVQPGGSLRLSCAASGFTFSMYPMFWVRQAPGKGLEWVSYISPSGGWTDYADSVKGRFTISRDNSKNTLYLQMNSLRAEDTAVYYCAKDRAYGDYVGWNGFDYWGQGTLVTVSS

SEQ ID NO: 774 - protein, 108 aa, Artificial Sequence; identical to SEQ ID NO: 10
  Description of Artificial Sequence: Synthetic polypeptide

SEQ ID NO: 775 - protein, 124 aa, Artificial Sequence
  Description of Artificial Sequence: Synthetic polypeptide
EVQLLESGGGLVQPGGSLRLSCAASGFTFSMYPMFWVRQAPGKGLEWVSYIVPSGGWTDYADSVKGRFTISRDNSKNTLYLQMNSLRAEDTAVYYCAKDRAYGDYVGWNGFDYWGQGTLVTVSS

SEQ ID NO: 776 - protein, 108 aa, Artificial Sequence; identical to SEQ ID NO: 10
  Description of Artificial Sequence: Synthetic polypeptide

SEQ ID NO: 777 - protein, 124 aa, Artificial Sequence
  Description of Artificial Sequence: Synthetic polypeptide
EVQLLESGGGLVQPGGSLRLSCAASGFTFSMYPMIWVRQAPGKGLEWVSYISPSGGGTFYADSVKGRFTISRDNSKNTLYLQMNSLRAEDTAVYYCAKDRAYGDYVGWNGFDYWGQGTLVTVSS

SEQ ID NO: 778 - protein, 108 aa, Artificial Sequence; identical to SEQ ID NO: 10
  Description of Artificial Sequence: Synthetic polypeptide

SEQ ID NO: 779 - protein, 124 aa, Artificial Sequence
  Description of Artificial Sequence: Synthetic polypeptide
EVQLLESGGGLVQPGGSLRLSCAASGFTFSMYPMIWVRQAPGKGLEWVSYIVPSGGFTGYADSVKGRFTISRDNSKNTLYLQMNSLRAEDTAVYYCAKDRAYGDYVGWNGFDYWGQGTLVTVSS

SEQ ID NO: 780 - protein, 108 aa, Artificial Sequence; identical to SEQ ID NO: 10
  Description of Artificial Sequence: Synthetic polypeptide

SEQ ID NO: 781 - protein, 124 aa, Artificial Sequence
  Description of Artificial Sequence: Synthetic polypeptide
EVQLLESGGGLVQPGGSLRLSCAASGFTFSMYPMLWVRQAPGKGLEWVSYISPSGGYTGYADSVKGRFTISRDNSKNTLYLQMNSLRAEDTAVYYCAKDRAYGDYVGWNGFDYWGQGTLVTVSS

SEQ ID NO: 782 - protein, 108 aa, Artificial Sequence; identical to SEQ ID NO: 10
  Description of Artificial Sequence: Synthetic polypeptide

SEQ ID NO: 783 - protein, 124 aa, Artificial Sequence
  Description of Artificial Sequence: Synthetic polypeptide
EVQLLESGGGLVQPGGSLRLSCAASGFTFSMYPMTWVRQAPGKGLEWVSYISPSGGYTGYADSVKGRFTISRDNSKNTLYLQMNSLRAEDTAVYYCAKDRAYGDYVGWNGFDYWGQGTLVTVSS

SEQ ID NO: 784 - protein, 108 aa, Artificial Sequence; identical to SEQ ID NO: 10
  Description of Artificial Sequence: Synthetic polypeptide

SEQ ID NO: 785 - protein, 124 aa, Artificial Sequence
  Description of Artificial Sequence: Synthetic polypeptide
EVQLLESGGGLVQPGGSLRLSCAASGFTFSMYSMWWVRQAPGKGLEWVSVIYPSGGFTDYADSVKGRFTISRDNSKNTLYLQMNSLRAEDTAVYYCAKDRAYGDYVGWNGFDYWGQGTLVTVSS

SEQ ID NO: 786 - protein, 108 aa, Artificial Sequence; identical to SEQ ID NO: 10
  Description of Artificial Sequence: Synthetic polypeptide

SEQ ID NO: 787 - protein, 124 aa, Artificial Sequence
  Description of Artificial Sequence: Synthetic polypeptide
EVQLLESGGGLVQPGGSLRLSCAASGFTFSMYWMLWVRQAPGKGLEWVSYISPSGGGTFYADSVKGRFTISRDNSKNTLYLQMNSLRAEDTAVYYCAKDRAYGDYVGWNGFDYWGQGTLVTVSS

SEQ ID NO: 788 - protein, 108 aa, Artificial Sequence; identical to SEQ ID NO: 10
  Description of Artificial Sequence: Synthetic polypeptide

SEQ ID NO: 789 - protein, 124 aa, Artificial Sequence
  Description of Artificial Sequence: Synthetic polypeptide
EVQLLESGGGLVQPGGSLRLSCAASGFTFSMYWMWWVRQAPGKGLEWVSSISSSGGYTGYADSVKGRFTISRDNSKNTLYLQMNSLRAEDTAVYYCAKDRAYGDYVGWNGFDYWGQGTLVTVSS

SEQ ID NO: 790 - protein, 108 aa, Artificial Sequence; identical to SEQ ID NO: 10
  Description of Artificial Sequence: Synthetic polypeptide

SEQ ID NO: 791 - protein, 123 aa, Artificial Sequence
  Description of Artificial Sequence: Synthetic polypeptide
EVQLLESGGGLVQPGGSLRLSCAASGFTFSNYAMWWVRQAPGKGLEWVSYISPSGATYYADSVKGRFTISRDNSKNTLYLQMNSLRAEDTAVYYCAKDRAYGDYVGWNGFDYWGQGTLVTVSS

SEQ ID NO: 792 - protein, 108 aa, Artificial Sequence; identical to SEQ ID NO: 10
  Description of Artificial Sequence: Synthetic polypeptide

SEQ ID NO: 793 - protein, 124 aa, Artificial Sequence
  Description of Artificial Sequence: Synthetic polypeptide
EVQLLESGGGLVQPGGSLRLSCAASGFTFSNYAMWWVRQAPGKGLEWVSYISPSGGSTYYADSVKGRFTISRDNSKNTLYLQMNSLRAEDTAVYYCAKDRAYGDYVGWNGFDYWGQGTLVTVSS

SEQ ID NO: 794 - protein, 108 aa, Artificial Sequence; identical to SEQ ID NO: 10
  Description of Artificial Sequence: Synthetic polypeptide

SEQ ID NO: 795 - protein, 124 aa, Artificial Sequence
  Description of Artificial Sequence: Synthetic polypeptide
EVQLLESGGGLVQPGGSLRLSCAASGFTFSNYDMAWVRQAPGKGLEWVSWISSSGGFTDYADSVKGRFTISRDNSKNTLYLQMNSLRAEDTAVYYCAKDRAYGDYVGWNGFDYWGQGTLVTVSS

SEQ ID NO: 796 - protein, 108 aa, Artificial Sequence; identical to SEQ ID NO: 10
  Description of Artificial Sequence: Synthetic polypeptide

SEQ ID NO: 797 - protein, 124 aa, Artificial Sequence
  Description of Artificial Sequence: Synthetic polypeptide
EVQLLESGGGLVQPGGSLRLSCAASGFTFSNYDMIWVRQAPGKGLEWVSVISPSGGWTSYADSVKGRFTISRDNSKNTLYLQMNSLRAEDTAVYYCAKDRAYGDYVGWNGFDYWGQGTLVTVSS

SEQ ID NO: 798 - protein, 108 aa, Artificial Sequence; identical to SEQ ID NO: 10
  Description of Artificial Sequence: Synthetic polypeptide

SEQ ID NO: 799 - protein, 124 aa, Artificial Sequence
  Description of Artificial Sequence: Synthetic polypeptide
EVQLLESGGGLVQPGGSLRLSCAASGFTFSNYDMIWVRQAPGKGLEWVSYIVPSGGYTAYADSVKGRFTISRDNSKNTLYLQMNSLRAEDTAVYYCAKDRAYGDYVGWNGFDYWGQGTLVTVSS

SEQ ID NO: 800 - protein, 108 aa, Artificial Sequence; identical to SEQ ID NO: 10
  Description of Artificial Sequence: Synthetic polypeptide

SEQ ID NO: 801 - protein, 124 aa, Artificial Sequence
  Description of Artificial Sequence: Synthetic polypeptide
EVQLLESGGGLVQPGGSLRLSCAASGFTFSNYDMWWVRQAPGKGLEWVSVISPSGGFTGYADSVKGRFTISRDNSKNTLYLQMNSLRAEDTAVYYCAKDRAYGDYVGWNGFDYWGQGTLVTVSS

SEQ ID NO: 802 - protein, 108 aa, Artificial Sequence; identical to SEQ ID NO: 10
  Description of Artificial Sequence: Synthetic polypeptide

SEQ ID NO: 803 - protein, 124 aa, Artificial Sequence
  Description of Artificial Sequence: Synthetic polypeptide
EVQLLESGGGLVQPGGSLRLSCAASGFTFSNYDMWWVRQAPGKGLEWVSVISSSGGYTGYADSVKGRFTISRDNSKNTLYLQMNSLRAEDTAVYYCAKDRAYGDYVGWNGFDYWGQGTLVTVSS

SEQ ID NO: 804 - protein, 108 aa, Artificial Sequence; identical to SEQ ID NO: 10
  Description of Artificial Sequence: Synthetic polypeptide

SEQ ID NO: 805 - protein, 123 aa, Artificial Sequence
  Description of Artificial Sequence: Synthetic polypeptide
EVQLLESGGGLVQPGGSLRLSCAASGFTFSNYDMWWVRQAPGKGLEWVSVISSSGMTYYADSVKGRFTISRDNSKNTLYLQMNSLRAEDTAVYYCAKDRAYGDYVGWNGFDYWGQGTLVTVSS

SEQ ID NO: 806 - protein, 108 aa, Artificial Sequence; identical to SEQ ID NO: 10
  Description of Artificial Sequence: Synthetic polypeptide

SEQ ID NO: 807 - protein, 124 aa, Artificial Sequence
  Description of Artificial Sequence: Synthetic polypeptide
EVQLLESGGGLVQPGGSLRLSCAASGFTFSNYDMWWVRQAPGKGLEWVSVIVPSGGATYYADSVKGRFTISRDNSKNTLYLQMNSLRAEDTAVYYCAKDRAYGDYVGWNGFDYWGQGTLVTVSS

SEQ ID NO: 808 - protein, 108 aa, Artificial Sequence; identical to SEQ ID NO: 10
  Description of Artificial Sequence: Synthetic polypeptide

SEQ ID NO: 809 - protein, 124 aa, Artificial Sequence
  Description of Artificial Sequence: Synthetic polypeptide
EVQLLESGGGLVQPGGSLRLSCAASGFTFSNYDMWWVRQAPGKGLEWVSVIYPSGGATFYADSVKGRFTISRDNSKNTLYLQMNSLRAEDTAVYYCAKDRAYGDYVGWNGFDYWGQGTLVTVSS

SEQ ID NO: 810 - protein, 108 aa, Artificial Sequence; identical to SEQ ID NO: 10
  Description of Artificial Sequence: Synthetic polypeptide

SEQ ID NO: 811 - protein, 124 aa, Artificial Sequence
  Description of Artificial Sequence: Synthetic polypeptide
EVQLLESGGGLVQPGGSLRLSCAASGFTFSNYDMWWVRQAPGKGLEWVSVIYPSGGITYYADSVKGRFTISRDNSKNTLYLQMNSLRAEDTAVYYCAKDRAYGDYVGWNGFDYWGQGTLVTVSS

SEQ ID NO: 812 - protein, 108 aa, Artificial Sequence; identical to SEQ ID NO: 10
  Description of Artificial Sequence: Synthetic polypeptide

SEQ ID NO: 813 - protein, 124 aa, Artificial Sequence
  Description of Artificial Sequence: Synthetic polypeptide
EVQLLESGGGLVQPGGSLRLSCAASGFTFSNYDMWWVRQAPGKGLEWVSVIYPSGGPTYYADSVKGRFTISRDNSKNTLYLQMNSLRAEDTAVYYCAKDRAYGDYVGWNGFDYWGQGTLVTVSS

SEQ ID NO: 814 - protein, 108 aa, Artificial Sequence; identical to SEQ ID NO: 10
  Description of Artificial Sequence: Synthetic polypeptide

SEQ ID NO: 815 - protein, 124 aa, Artificial Sequence
  Description of Artificial Sequence: Synthetic polypeptide
EVQLLESGGGLVQPGGSLRLSCAASGFTFSNYDMWWVRQAPGKGLEWVSVIYPSGGYTVYADSVKGRFTISRDNSKNTLYLQMNSLRAEDTAVYYCAKDRAYGDYVGWNGFDYWGQGTLVTVSS

SEQ ID NO: 816 - protein, 108 aa, Artificial Sequence; identical to SEQ ID NO: 10
  Description of Artificial Sequence: Synthetic polypeptide

SEQ ID NO: 817 - protein, 124 aa, Artificial Sequence
  Description of Artificial Sequence: Synthetic polypeptide
EVQLLESGGGLVQPGGSLRLSCAASGFTFSNYDMWWVRQAPGKGLEWVSVIYSSGGPTYYADSVKGRFTISRDNSKNTLYLQMNSLRAEDTAVYYCAKDRAYGDYVGWNGFDYWGQGTLVTVSS

SEQ ID NO: 818 - protein, 108 aa, Artificial Sequence; identical to SEQ ID NO: 10
  Description of Artificial Sequence: Synthetic polypeptide

SEQ ID NO: 819 - protein, 124 aa, Artificial Sequence
  Description of Artificial Sequence: Synthetic polypeptide
EVQLLESGGGLVQPGGSLRLSCAASGFTFSNYDMWWVRQAPGKGLEWVSVIYSSGGYTAYADSVKGRFTISRDNSKNTLYLQMNSLRAEDTAVYYCAKDRAYGDYVGWNGFDYWGQGTLVTVSS

SEQ ID NO: 820 - protein, 108 aa, Artificial Sequence; identical to SEQ ID NO: 10
  Description of Artificial Sequence: Synthetic polypeptide

SEQ ID NO: 821 - protein, 124 aa, Artificial Sequence
  Description of Artificial Sequence: Synthetic polypeptide
EVQLLESGGGLVQPGGSLRLSCAASGFTFSNYDMWWVRQAPGKGLEWVSWISSSGGATIYADSVKGRFTISRDNSKNTLYLQMNSLRAEDTAVYYCAKDRAYGDYVGWNGFDYWGQGTLVTVSS

SEQ ID NO: 822 - protein, 108 aa, Artificial Sequence; identical to SEQ ID NO: 10
  Description of Artificial Sequence: Synthetic polypeptide

SEQ ID NO: 823 - protein, 124 aa, Artificial Sequence
  Description of Artificial Sequence: Synthetic polypeptide
EVQLLESGGGLVQPGGSLRLSCAASGFTFSNYDMWWVRQAPGKGLEWVSYISSSGGATLYADSVKGRFTISRDNSKNTLYLQMNSLRAEDTAVYYCAKDRAYGDYVGWNGFDYWGQGTLVTVSS

SEQ ID NO: 824 - protein, 108 aa, Artificial Sequence; identical to SEQ ID NO: 10
  Description of Artificial Sequence: Synthetic polypeptide

SEQ ID NO: 825 - protein, 124 aa, Artificial Sequence
  Description of Artificial Sequence: Synthetic polypeptide
EVQLLESGGGLVQPGGSLRLSCAASGFTFSNYEMWWVRQAPGKGLEWVSVIYSSGSATFYADSVKGRFTISRDNSKNTLYLQMNSLRAEDTAVYYCAKDRAYGDYVGWNGFDYWGQGTLVTVSS

SEQ ID NO: 826 - protein, 108 aa, Artificial Sequence; identical to SEQ ID NO: 10
  Description of Artificial Sequence: Synthetic polypeptide

SEQ ID NO: 827 - protein, 124 aa, Artificial Sequence
  Description of Artificial Sequence: Synthetic polypeptide
EVQLLESGGGLVQPGGSLRLSCAASGFTFSNYIMWWVRQAPGKGLEWVSSIYPSGGATLYADSVKGRFTISRDNSKNTLYLQMNSLRAEDTAVYYCAKDRAYGDYVGWNGFDYWGQGTLVTVSS

SEQ ID NO: 828 - protein, 108 aa, Artificial Sequence; identical to SEQ ID NO: 10
  Description of Artificial Sequence: Synthetic polypeptide

SEQ ID NO: 829 - protein, 124 aa, Artificial Sequence
  Description of Artificial Sequence: Synthetic polypeptide
EVQLLESGGGLVQPGGSLRLSCAASGFTFSNYMMIWVRQAPGKGLEWVSSIYPSGGYTGYADSVKGRFTISRDNSKNTLYLQMNSLRAEDTAVYYCAKDRAYGDYVGWNGFDYWGQGTLVTVSS

SEQ ID NO: 830 - protein, 108 aa, Artificial Sequence; identical to SEQ ID NO: 10
  Description of Artificial Sequence: Synthetic polypeptide

SEQ ID NO: 831 - protein, 124 aa, Artificial Sequence
  Description of Artificial Sequence: Synthetic polypeptide
EVQLLESGGGLVQPGGSLRLSCAASGFTFSNYMMIWVRQAPGKGLEWVSSIYSSGGFTSYADSVKGRFTISRDNSKNTLYLQMNSLRAEDTAVYYCAKDRAYGDYVGWNGFDYWGQGTLVTVSS

SEQ ID NO: 832 - protein, 108 aa, Artificial Sequence; identical to SEQ ID NO: 10
  Description of Artificial Sequence: Synthetic polypeptide

SEQ ID NO: 833 - protein, 124 aa, Artificial Sequence
  Description of Artificial Sequence: Synthetic polypeptide
EVQLLESGGGLVQPGGSLRLSCAASGFTFSNYMMWWVRQAPGKGLEWVSSIGPSGGGTFYADSVKGRFTISRDNSKNTLYLQMNSLRAEDTAVYYCAKDRAYGDYVGWNGFDYWGQGTLVTVSS

SEQ ID NO: 834 - protein, 108 aa, Artificial Sequence; identical to SEQ ID NO: 10
  Description of Artificial Sequence: Synthetic polypeptide

SEQ ID NO: 835 - protein, 124 aa, Artificial Sequence
  Description of Artificial Sequence: Synthetic polypeptide
EVQLLESGGGLVQPGGSLRLSCAASGFTFSNYMMWWVRQAPGKGLEWVSSIYSSGGGTFYADSVKGRFTISRDNSKNTLYLQMNSLRAEDTAVYYCAKDRAYGDYVGWNGFDYWGQGTLVTVSS

SEQ ID NO: 836 - protein, 108 aa, Artificial Sequence; identical to SEQ ID NO: 10
  Description of Artificial Sequence: Synthetic polypeptide

SEQ ID NO: 837 - protein, 124 aa, Artificial Sequence
  Description of Artificial Sequence: Synthetic polypeptide
EVQLLESGGGLVQPGGSLRLSCAASGFTFSNYMMWWVRQAPGKGLEWVSVISPSGGATYYADSVKGRFTISRDNSKNTLYLQMNSLRAEDTAVYYCAKDRAYGDYVGWNGFDYWGQGTLVTVSS

SEQ ID NO: 838 - protein, 108 aa, Artificial Sequence; identical to SEQ ID NO: 10
  Description of Artificial Sequence: Synthetic polypeptide

SEQ ID NO: 839 - protein, 124 aa, Artificial Sequence
  Description of Artificial Sequence: Synthetic polypeptide
EVQLLESGGGLVQPGGSLRLSCAASGFTFSNYNMMWVRQAPGKGLEWVSYISSSGGYTGYADSVKGRFTISRDNSKNTLYLQMNSLRAEDTAVYYCAKDRAYGDYVGWNGFDYWGQGTLVTVSS

SEQ ID NO: 840 - protein, 108 aa, Artificial Sequence; identical to SEQ ID NO: 10
  Description of Artificial Sequence: Synthetic polypeptide

SEQ ID NO: 841 - protein, 124 aa, Artificial Sequence
  Description of Artificial Sequence: Synthetic polypeptide
EVQLLESGGGLVQPGGSLRLSCAASGFTFSNYNMWWVRQAPGKGLEWVSVIYPSGGPTFYADSVKGRFTISRDNSKNTLYLQMNSLRAEDTAVYYCAKDRAYGDYVGWNGFDYWGQGTLVTVSS

SEQ ID NO: 842 - protein, 108 aa, Artificial Sequence; identical to SEQ ID NO: 10
  Description of Artificial Sequence: Synthetic polypeptide

SEQ ID NO: 843 - protein, 124 aa, Artificial Sequence
  Description of Artificial Sequence: Synthetic polypeptide
EVQLLESGGGLVQPGGSLRLSCAASGFTFSNYNMWWVRQAPGKGLEWVSYISPSGGGTLYADSVKGRFTISRDNSKNTLYLQMNSLRAEDTAVYYCAKDRAYGDYVGWNGFDYWGQGTLVTVSS

SEQ ID NO: 844 - protein, 108 aa, Artificial Sequence; identical to SEQ ID NO: 10
  Description of Artificial Sequence: Synthetic polypeptide

SEQ ID NO: 845 - protein, 124 aa, Artificial Sequence
  Description of Artificial Sequence: Synthetic polypeptide
EVQLLESGGGLVQPGGSLRLSCAASGFTFSNYPMFWVRQAPGKGLEWVSYISPSGGWTSYADSVKGRFTISRDNSKNTLYLQMNSLRAEDTAVYYCAKDRAYGDYVGWNGFDYWGQGTLVTVSS

SEQ ID NO: 846 - protein, 108 aa, Artificial Sequence; identical to SEQ ID NO: 10
  Description of Artificial Sequence: Synthetic polypeptide

SEQ ID NO: 847 - protein, 124 aa, Artificial Sequence
  Description of Artificial Sequence: Synthetic polypeptide
EVQLLESGGGLVQPGGSLRLSCAASGFTFSNYPMIWVRQAPGKGLEWVSYISPSGGGTFYADSVKGRFTISRDNSKNTLYLQMNSLRAEDTAVYYCAKDRAYGDYVGWNGFDYWGQGTLVTVSS

SEQ ID NO: 848 - protein, 108 aa, Artificial Sequence; identical to SEQ ID NO: 10
  Description of Artificial Sequence: Synthetic polypeptide

SEQ ID NO: 849 - protein, 124 aa, Artificial Sequence
  Description of Artificial Sequence: Synthetic polypeptide
EVQLLESGGGLVQPGGSLRLSCAASGFTFSNYPMIWVRQAPGKGLEWVSYISSSGGYTGYADSVKGRFTISRDNSKNTLYLQMNSLRAEDTAVYYCAKDRAYGDYVGWNGFDYWGQGTLVTVSS

SEQ ID NO: 850 - protein, 108 aa, Artificial Sequence; identical to SEQ ID NO: 10
  Description of Artificial Sequence: Synthetic polypeptide

SEQ ID NO: 851 - protein, 124 aa, Artificial Sequence
  Description of Artificial Sequence: Synthetic polypeptide
EVQLLESGGGLVQPGGSLRLSCAASGFTFSNYPMIWVRQAPGKGLEWVSYIVPSGGFTSYADSVKGRFTISRDNSKNTLYLQMNSLRAEDTAVYYCAKDRAYGDYVGWNGFDYWGQGTLVTVSS

SEQ ID NO: 852 - protein, 108 aa, Artificial Sequence; identical to SEQ ID NO: 10
  Description of Artificial Sequence: Synthetic polypeptide

SEQ ID NO: 853 - protein, 124 aa, Artificial Sequence
  Description of Artificial Sequence: Synthetic polypeptide
EVQLLESGGGLVQPGGSLRLSCAASGFTFSNYPMIWVRQAPGKGLEWVSYIYPSGGGTYYADSVKGRFTISRDNSKNTLYLQMNSLRAEDTAVYYCAKDRAYGDYVGWNGFDYWGQGTLVTVSS

SEQ ID NO: 854 - protein, 108 aa, Artificial Sequence; identical to SEQ ID NO: 10
  Description of Artificial Sequence: Synthetic polypeptide

SEQ ID NO: 855 - protein, 123 aa, Artificial Sequence
  Description of Artificial Sequence: Synthetic polypeptide
EVQLLESGGGLVQPGGSLRLSCAASGFTFSNYPMIWVRQAPGKGLEWVSYIYPSGGTFYADSVKGRFTISRDNSKNTLYLQMNSLRAEDTAVYYCAKDRAYGDYVGWNGFDYWGQGTLVTVSS

SEQ ID NO: 856 - protein, 108 aa, Artificial Sequence; identical to SEQ ID NO: 10
  Description of Artificial Sequence: Synthetic polypeptide

SEQ ID NO: 857 - protein, 124 aa, Artificial Sequence
  Description of Artificial Sequence: Synthetic polypeptide
EVQLLESGGGLVQPGGSLRLSCAASGFTFSNYPMWWVRQAPGKGLEWVSSISPSGGSTYYADSVKGRFTISRDNSKNTLYLQMNSLRAEDTAVYYCAKDRAYGDYVGWNGFDYWGQGTLVTVSS

SEQ ID NO: 858 - protein, 108 aa, Artificial Sequence; identical to SEQ ID NO: 10
  Description of Artificial Sequence: Synthetic polypeptide

SEQ ID NO: 859 - protein, 124 aa, Artificial Sequence
  Description of Artificial Sequence: Synthetic polypeptide
EVQLLESGGGLVQPGGSLRLSCAASGFTFSNYPMWWVRQAPGKGLEWVSSIVPSGGATYYADSVKGRFTISRDNSKNTLYLQMNSLRAEDTAVYYCAKDRAYGDYVGWNGFDYWGQGTLVTVSS

SEQ ID NO: 860 - protein, 108 aa, Artificial Sequence; identical to SEQ ID NO: 10
  Description of Artificial Sequence: Synthetic polypeptide

SEQ ID NO: 861 - protein, 124 aa, Artificial Sequence
  Description of Artificial Sequence: Synthetic polypeptide
EVQLLESGGGLVQPGGSLRLSCAASGFTFSNYPMWWVRQAPGKGLEWVSSIYPSGGATFYADSVKGRFTISRDNSKNTLYLQMNSLRAEDTAVYYCAKDRAYGDYVGWNGFDYWGQGTLVTVSS

SEQ ID NO: 862 - protein, 108 aa, Artificial Sequence; identical to SEQ ID NO: 10
  Description of Artificial Sequence: Synthetic polypeptide

SEQ ID NO: 863 - protein, 125 aa, Artificial Sequence
  Description of Artificial Sequence: Synthetic polypeptide
EVQLLESGGGLVQPGGSLRLSCAASGFTFSNYPMWWVRQAPGKGLEWVSSIYPSGGKATYYADSVKGRFTISRDNSKNTLYLQMNSLRAEDTAVYYCAKDRAYGDYVGWNGFDYWGQGTLVTVSS

SEQ ID NO: 864 - protein, 108 aa, Artificial Sequence; identical to SEQ ID NO: 10
  Description of Artificial Sequence: Synthetic polypeptide

SEQ ID NO: 865 - protein, 124 aa, Artificial Sequence
  Description of Artificial Sequence: Synthetic polypeptide
EVQLLESGGGLVQPGGSLRLSCAASGFTFSNYPMWWVRQAPGKGLEWVSSIYPSGGPTFYADSVKGRFTISRDNSKNTLYLQMNSLRAEDTAVYYCAKDRAYGDYVGWNGFDYWGQGTLVTVSS

SEQ ID NO: 866 - protein, 108 aa, Artificial Sequence; identical to SEQ ID NO: 10
  Description of Artificial Sequence: Synthetic polypeptide

SEQ ID NO: 867 - protein, 124 aa, Artificial Sequence
  Description of Artificial Sequence: Synthetic polypeptide
EVQLLESGGGLVQPGGSLRLSCAASGFTFSNYPMWWVRQAPGKGLEWVSSIYSSGGATFYADSVKGRFTISRDNSKNTLYLQMNSLRAEDTAVYYCAKDRAYGDYVGWNGFDYWGQGTLVTVSS

SEQ ID NO: 868 - protein, 108 aa, Artificial Sequence; identical to SEQ ID NO: 10
  Description of Artificial Sequence: Synthetic polypeptide

SEQ ID NO: 869 - protein, 124 aa, Artificial Sequence
  Description of Artificial Sequence: Synthetic polypeptide
EVQLLESGGGLVQPGGSLRLSCAASGFTFSNYPMWWVRQAPGKGLEWVSVIYPSGGYTAYADSVKGRFTISRDNSKNTLYLQMNSLRAEDTAVYYCAKDRAYGDYVGWNGFDYWGQGTLVTVSS

SEQ ID NO: 870 - protein, 108 aa, Artificial Sequence; identical to SEQ ID NO: 10
  Description of Artificial Sequence: Synthetic polypeptide

SEQ ID NO: 871 - protein, 124 aa, Artificial Sequence
  Description of Artificial Sequence: Synthetic polypeptide
EVQLLESGGGLVQPGGSLRLSCAASGFTFSNYPMWWVRQAPGKGLEWVSYIGPSGGGTLYADSVKGRFTISRDNSKNTLYLQMNSLRAEDTAVYYCAKDRAYGDYVGWNGFDYWGQGTLVTVSS

SEQ ID NO: 872 - protein, 108 aa, Artificial Sequence; identical to SEQ ID NO: 10
  Description of Artificial Sequence: Synthetic polypeptide

SEQ ID NO: 873 - protein, 124 aa, Artificial Sequence
  Description of Artificial Sequence: Synthetic polypeptide
EVQLLESGGGLVQPGGSLRLSCAASGFTFSNYPMWWVRQAPGKGLEWVSYIRPSGGPTWYADSVKGRFTISRDNSKNTLYLQMNSLRAEDTAVYYCAKDRAYGDYVGWNGFDYWGQGTLVTVSS

SEQ ID NO: 874 - protein, 108 aa, Artificial Sequence; identical to SEQ ID NO: 10
  Description of Artificial Sequence: Synthetic polypeptide

SEQ ID NO: 875 - protein, 124 aa, Artificial Sequence
  Description of Artificial Sequence: Synthetic polypeptide
EVQLLESGGGLVQPGGSLRLSCAASGFTFSNYPMWWVRQAPGKGLEWVSYISPSGGGTFYADSVKGRFTISRDNSKNTLYLQMNSLRAEDTAVYYCAKDRAYGDYVGWNGFDYWGQGTLVTVSS

SEQ ID NO: 876 - protein, 108 aa, Artificial Sequence; identical to SEQ ID NO: 10
  Description of Artificial Sequence: Synthetic polypeptide

SEQ ID NO: 877 - protein, 124 aa, Artificial Sequence
  Description of Artificial Sequence: Synthetic polypeptide
EVQLLESGGGLVQPGGSLRLSCAASGFTFSNYPMWWVRQAPGKGLEWVSYISPSGGGTLYADSVKGRFTISRDNSKNTLYLQMNSLRAEDTAVYYCAKDRAYGDYVGWNGFDYWGQGTLVTVSS

SEQ ID NO: 878 - protein, 108 aa, Artificial Sequence; identical to SEQ ID NO: 10
  Description of Artificial Sequence: Synthetic polypeptide

SEQ ID NO: 879 - protein, 124 aa, Artificial Sequence
  Description of Artificial Sequence: Synthetic polypeptide
EVQLLESGGGLVQPGGSLRLSCAASGFTFSNYPMWWVRQAPGKGLEWVSYIVPSGGATFYADSVKGRFTISRDNSKNTLYLQMNSLRAEDTAVYYCAKDRAYGDYVGWNGFDYWGQGTLVTVSS

SEQ ID NO: 880 - protein, 108 aa, Artificial Sequence; identical to SEQ ID NO: 10
  Description of Artificial Sequence: Synthetic polypeptide

SEQ ID NO: 881 - protein, 124 aa, Artificial Sequence
  Description of Artificial Sequence: Synthetic polypeptide
EVQLLESGGGLVQPGGSLRLSCAASGFTFSNYPMWWVRQAPGKGLEWVSYIVPSGGMTYYADSVKGRFTISRDNSKNTLYLQMNSLRAEDTAVYYCAKDRAYGDYVGWNGFDYWGQGTLVTVSS

SEQ ID NO: 882 - protein, 108 aa, Artificial Sequence; identical to SEQ ID NO: 10
  Description of Artificial Sequence: Synthetic polypeptide

SEQ ID NO: 883 - protein, 124 aa, Artificial Sequence
  Description of Artificial Sequence: Synthetic polypeptide
EVQLLESGGGLVQPGGSLRLSCAASGFTFSNYSMWWVRQAPGKGLEWVSVIYPSGGYTSYADSVKGRFTISRDNSKNTLYLQMNSLRAEDTAVYYCAKDRAYGDYVGWNGFDYWGQGTLVTVSS

SEQ ID NO: 884 - protein, 108 aa, Artificial Sequence; identical to SEQ ID NO: 10
  Description of Artificial Sequence: Synthetic polypeptide

SEQ ID NO: 885 - protein, 124 aa, Artificial Sequence
  Description of Artificial Sequence: Synthetic polypeptide
EVQLLESGGGLVQPGGSLRLSCAASGFTFSNYYMIWVRQAPGKGLEWVSYISPSGGGTYYADSVKGRFTISRDNSKNTLYLQMNSLRAEDTAVYYCAKDRAYGDYVGWNGFDYWGQGTLVTVSS

SEQ ID NO: 886 - protein, 108 aa, Artificial Sequence; identical to SEQ ID NO: 10
  Description of Artificial Sequence: Synthetic polypeptide

SEQ ID NO: 887 - protein, 124 aa, Artificial Sequence
  Description of Artificial Sequence: Synthetic polypeptide
EVQLLESGGGLVQPGGSLRLSCAASGFTFSPYAMWWVRQAPGKGLEWVSYISSSGGGTFYADSVKGRFTISRDNSKNTLYLQMNSLRAEDTAVYYCAKDRAYGDYVGWNGFDYWGQGTLVTVSS

SEQ ID NO: 888 - protein, 108 aa, Artificial Sequence; identical to SEQ ID NO: 10
  Description of Artificial Sequence: Synthetic polypeptide

SEQ ID NO: 889 - protein, 124 aa, Artificial Sequence
  Description of Artificial Sequence: Synthetic polypeptide
EVQLLESGGGLVQPGGSLRLSCAASGFTFSPYDMWWVRQAPGKGLEWVSVISPSGGATFYADSVKGRFTISRDNSKNTLYLQMNSLRAEDTAVYYCAKDRAYGDYVGWNGFDYWGQGTLVTVSS

SEQ ID NO: 890 - protein, 108 aa, Artificial Sequence; identical to SEQ ID NO: 10
  Description of Artificial Sequence: Synthetic polypeptide

SEQ ID NO: 891 - protein, 124 aa, Artificial Sequence
  Description of Artificial Sequence: Synthetic polypeptide
EVQLLESGGGLVQPGGSLRLSCAASGFTFSPYDMWWVRQAPGKGLEWVSVISPSGGYTGYADSVKGRFTISRDNSKNTLYLQMNSLRAEDTAVYYCAKDRAYGDYVGWNGFDYWGQGTLVTVSS

SEQ ID NO: 892 - protein, 108 aa, Artificial Sequence; identical to SEQ ID NO: 10
  Description of Artificial Sequence: Synthetic polypeptide

SEQ ID NO: 893 - protein, 124 aa, Artificial Sequence
  Description of Artificial Sequence: Synthetic polypeptide
EVQLLESGGGLVQPGGSLRLSCAASGFTFSPYDMWWVRQAPGKGLEWVSVISSSGGFTDYADSVKGRFTISRDNSKNTLYLQMNSLRAEDTAVYYCAKDRAYGDYVGWNGFDYWGQGTLVTVSS

SEQ ID NO: 894 - protein, 108 aa, Artificial Sequence; identical to SEQ ID NO: 10
  Description of Artificial Sequence: Synthetic polypeptide

SEQ ID NO: 895 - protein, 124 aa, Artificial Sequence
  Description of Artificial Sequence: Synthetic polypeptide
EVQLLESGGGLVQPGGSLRLSCAASGFTFSPYMMFWVRQAPGKGLEWVSSISSSGGGTFYADSVKGRFTISRDNSKNTLYLQMNSLRAEDTAVYYCAKDRAYGDYVGWNGFDYWGQGTLVTVSS

SEQ ID NO: 896 - protein, 108 aa, Artificial Sequence; identical to SEQ ID NO: 10
  Description of Artificial Sequence: Synthetic polypeptide

SEQ ID NO: 897 - protein, 124 aa, Artificial Sequence
  Description of Artificial Sequence: Synthetic polypeptide
EVQLLESGGGLVQPGGSLRLSCAASGFTFSPYMMIWVRQAPGKGLEWVSSISSSGGYTGYADSVKGRFTISRDNSKNTLYLQMNSLRAEDTAVYYCAKDRAYGDYVGWNGFDYWGQGTLVTVSS

SEQ ID NO: 898 - protein, 108 aa, Artificial Sequence; identical to SEQ ID NO: 10
  Description of Artificial Sequence: Synthetic polypeptide

SEQ ID NO: 899 - protein, 124 aa, Artificial Sequence
  Description of Artificial Sequence: Synthetic polypeptide
EVQLLESGGGLVQPGGSLRLSCAASGFTFSPYMMSWVRQAPGKGLEWVSSIYSSGGATFYADSVKGRFTISRDNSKNTLYLQMNSLRAEDTAVYYCAKDRAYGDYVGWNGFDYWGQGTLVTVSS

SEQ ID NO: 900 - protein, 108 aa, Artificial Sequence; identical to SEQ ID NO: 10
  Description of Artificial Sequence: Synthetic polypeptide

SEQ ID NO: 901 - protein, 124 aa, Artificial Sequence
  Description of Artificial Sequence: Synthetic polypeptide
EVQLLESGGGLVQPGGSLRLSCAASGFTFSPYMMWWVRQAPGKGLEWVSSISSSGGGTFYADSVKGRFTISRDNSKNTLYLQMNSLRAEDTAVYYCAKDRAYGDYVGWNGFDYWGQGTLVTVSS

SEQ ID NO: 902 - protein, 108 aa, Artificial Sequence; identical to SEQ ID NO: 10
  Description of Artificial Sequence: Synthetic polypeptide

SEQ ID NO: 903 - protein, 124 aa, Artificial Sequence
  Description of Artificial Sequence: Synthetic polypeptide
EVQLLESGGGLVQPGGSLRLSCAASGFTFSPYNMWWVRQAPGKGLEWVSVIYPSGGATFYADSVKGRFTISRDNSKNTLYLQMNSLRAEDTAVYYCAKDRAYGDYVGWNGFDYWGQGTLVTVSS

SEQ ID NO: 904 - protein, 108 aa, Artificial Sequence; identical to SEQ ID NO: 10
  Description of Artificial Sequence: Synthetic polypeptide

SEQ ID NO: 905 - protein, 124 aa, Artificial Sequence
  Description of Artificial Sequence: Synthetic polypeptide
EVQLLESGGGLVQPGGSLRLSCAASGFTFSPYPMFWVRQAPGKGLEWVSSISPSGGATYYADSVKGRFTISRDNSKNTLYLQMNSLRAEDTAVYYCAKDRAYGDYVGWNGFDYWGQGTLVTVSS

SEQ ID NO: 906 - protein, 108 aa, Artificial Sequence; identical to SEQ ID NO: 10
  Description of Artificial Sequence: Synthetic polypeptide

SEQ ID NO: 907 - protein, 124 aa, Artificial Sequence
  Description of Artificial Sequence: Synthetic polypeptide
EVQLLESGGGLVQPGGSLRLSCAASGFTFSPYPMIWVRQAPGKGLEWVSYIGSSGGYTSYADSVKGRFTISRDNSKNTLYLQMNSLRAEDTAVYYCAKDRAYGDYVGWNGFDYWGQGTLVTVSS

SEQ ID NO: 908 - protein, 108 aa, Artificial Sequence; identical to SEQ ID NO: 10
  Description of Artificial Sequence: Synthetic polypeptide

SEQ ID NO: 909 - protein, 124 aa, Artificial Sequence
  Description of Artificial Sequence: Synthetic polypeptide
EVQLLESGGGLVQPGGSLRLSCAASGFTFSPYPMIWVRQAPGKGLEWVSYISPSGGFTDYADSVKGRFTISRDNSKNTLYLQMNSLRAEDTAVYYCAKDRAYGDYVGWNGFDYWGQGTLVTVSS

SEQ ID NO: 910 - protein, 108 aa, Artificial Sequence; identical to SEQ ID NO: 10
  Description of Artificial Sequence: Synthetic polypeptide

SEQ ID NO: 911 - protein, 124 aa, Artificial Sequence
  Description of Artificial Sequence: Synthetic polypeptide
EVQLLESGGGLVQPGGSLRLSCAASGFTFSPYPMIWVRQAPGKGLEWVSYISPSGGGTFYADSVKGRFTISRDNSKNTLYLQMNSLRAEDTAVYYCAKDRAYGDYVGWNGFDYWGQGTLVTVSS

SEQ ID NO: 912 - protein, 108 aa, Artificial Sequence; identical to SEQ ID NO: 10
  Description of Artificial Sequence: Synthetic polypeptide

SEQ ID NO: 913 - protein, 124 aa, Artificial Sequence
  Description of Artificial Sequence: Synthetic polypeptide
EVQLLESGGGLVQPGGSLRLSCAASGFTFSPYPMIWVRQAPGKGLEWVSYISSSGGGTYYADSVKGRFTISRDNSKNTLYLQMNSLRAEDTAVYYCAKDRAYGDYVGWNGFDYWGQGTLVTVSS

SEQ ID NO: 914 - protein, 108 aa, Artificial Sequence; identical to SEQ ID NO: 10
  Description of Artificial Sequence: Synthetic polypeptide

SEQ ID NO: 915 - protein, 124 aa, Artificial Sequence
  Description of Artificial Sequence: Synthetic polypeptide
EVQLLESGGGLVQPGGSLRLSCAASGFTFSPYPMIWVRQAPGKGLEWVSYISSSGGYTDYADSVKGRFTISRDNSKNTLYLQMNSLRAEDTAVYYCAKDRAYGDYVGWNGFDYWGQGTLVTVSS

SEQ ID NO: 916 - protein, 108 aa, Artificial Sequence; identical to SEQ ID NO: 10
  Description of Artificial Sequence: Synthetic polypeptide

SEQ ID NO: 917 - protein, 124 aa, Artificial Sequence
  Description of Artificial Sequence: Synthetic polypeptide
EVQLLESGGGLVQPGGSLRLSCAASGFTFSPYPMWWVRQAPGKGLEWVSYISPSGGWTDYADSVKGRFTISRDNSKNTLYLQMNSLRAEDTAVYYCAKDRAYGDYVGWNGFDYWGQGTLVTVSS

SEQ ID NO: 918 - protein, 108 aa, Artificial Sequence; identical to SEQ ID NO: 10
  Description of Artificial Sequence: Synthetic polypeptide

SEQ ID NO: 919 - protein, 124 aa, Artificial Sequence
  Description of Artificial Sequence: Synthetic polypeptide
EVQLLESGGGLVQPGGSLRLSCAASGFTFSPYPMWWVRQAPGKGLEWVSYIVPSGGKTFYADSVKGRFTISRDNSKNTLYLQMNSLRAEDTAVYYCAKDRAYGDYVGWNGFDYWGQGTLVTVSS

SEQ ID NO: 920 - protein, 108 aa, Artificial Sequence; identical to SEQ ID NO: 10
  Description of Artificial Sequence: Synthetic polypeptide

SEQ ID NO: 921 - protein, 124 aa, Artificial Sequence
  Description of Artificial Sequence: Synthetic polypeptide
EVQLLESGGGLVQPGGSLRLSCAASGFTFSQYAMIWVRQAPGKGLEWVSYISPSGGYTGYADSVKGRFTISRDNSKNTLYLQMNSLRAEDTAVYYCAKDRAYGDYVGWNGFDYWGQGTLVTVSS

SEQ ID NO: 922 - protein, 108 aa, Artificial Sequence; identical to SEQ ID NO: 10
  Description of Artificial Sequence: Synthetic polypeptide

SEQ ID NO: 923 - protein, 124 aa, Artificial Sequence
  Description of Artificial Sequence: Synthetic polypeptide
EVQLLESGGGLVQPGGSLRLSCAASGFTFSQYDMIWVRQAPGKGLEWVSYIGSSGGSTIYADSVKGRFTISRDNSKNTLYLQMNSLRAEDTAVYYCAKDRAYGDYVGWNGFDYWGQGTLVTVSS

SEQ ID NO: 924 - protein, 108 aa, Artificial Sequence; identical to SEQ ID NO: 10
  Description of Artificial Sequence: Synthetic polypeptide

SEQ ID NO: 925 - protein, 124 aa, Artificial Sequence
  Description of Artificial Sequence: Synthetic polypeptide
EVQLLESGGGLVQPGGSLRLSCAASGFTFSQYDMWWFRQAPGKGLEWVSVISPSGGHTSYADSVKGRFTISRDNSKNTLYLQMNSLRAEDTAVYYCAKDRAYGDYVGWNGFDYWGQGTLVTVSS

SEQ ID NO: 926 - protein, 108 aa, Artificial Sequence; identical to SEQ ID NO: 10
  Description of Artificial Sequence: Synthetic polypeptide

SEQ ID NO: 927 - protein, 124 aa, Artificial Sequence
  Description of Artificial Sequence: Synthetic polypeptide
EVQLLESGGGLVQPGGSLRLSCAASGFTFSQYDMWWVRQAPGKGLEWVSVISSSGGATWYADSVKGRFTISRDNSKNTLYLQMNSLRAEDTAVYYCAKDRAYGDYVGWNGFDYWGQGTLVTVSS

SEQ ID NO: 928 - protein, 108 aa, Artificial Sequence; identical to SEQ ID NO: 10
  Description of Artificial Sequence: Synthetic polypeptide

SEQ ID NO: 929 - protein, 124 aa, Artificial Sequence
  Description of Artificial Sequence: Synthetic polypeptide
EVQLLESGGGLVQPGGSLRLSCAASGFTFSQYDMWWVRQAPGKGLEWVSVIYPSGGPTFYADSVKGRFTISRDNSKNTLYLQMNSLRAEDTAVYYCAKDRAYGDYVGWNGFDYWGQGTLVTVSS

SEQ ID NO: 930 - protein, 108 aa, Artificial Sequence; identical to SEQ ID NO: 10
  Description of Artificial Sequence: Synthetic polypeptide

SEQ ID NO: 931 - protein, 124 aa, Artificial Sequence
  Description of Artificial Sequence: Synthetic polypeptide
EVQLLESGGGLVQPGGSLRLSCAASGFTFSQYDMWWVRQAPGKGLEWVSVIYPSGGTTFYADSVKGRFTISRDNSKNTLYLQMNSLRAEDTAVYYCAKDRAYGDYVGWNGFDYWGQGTLVTVSS

SEQ ID NO: 932 - protein, 108 aa, Artificial Sequence; identical to SEQ ID NO: 10
  Description of Artificial Sequence: Synthetic polypeptide

SEQ ID NO: 933 - protein, 124 aa, Artificial Sequence
  Description of Artificial Sequence: Synthetic polypeptide
EVQLLESGGGLVQPGGSLRLSCAASGFTFSQYDMWWVRQAPGKGLEWVSVIYPSGGYTDYADSVKGRFTISRDNSKNTLYLQMNSLRAEDTAVYYCAKDRAYGDYVGWNGFDYWGQGTLVTVSS

SEQ ID NO: 934 - protein, 108 aa, Artificial Sequence; identical to SEQ ID NO: 10
  Description of Artificial Sequence: Synthetic polypeptide

SEQ ID NO: 935 - protein, 123 aa, Artificial Sequence
  Description of Artificial Sequence: Synthetic polypeptide
EVQLLESGGGLVQPGGSLRLSCAASGFTFSQYDMWWVRQAPGKGLEWVSVIYPSGTTFYADSVKGRFTISRDNSKNTLYLQMNSLRAEDTAVYYCAKDRAYGDYVGWNGFDYWGQGTLVTVSS

SEQ ID NO: 936 - protein, 108 aa, Artificial Sequence; identical to SEQ ID NO: 10
  Description of Artificial Sequence: Synthetic polypeptide

SEQ ID NO: 937 - protein, 124 aa, Artificial Sequence
  Description of Artificial Sequence: Synthetic polypeptide
EVQLLESGGGLVQPGGSLRLSCAASGFTFSQYDMWWVRQAPGKGLEWVSYIVPSGGFTDYADSVKGRFTISRDNSKNTLYLQMNSLRAEDTAVYYCAKDRAYGDYVGWNGFDYWGQGTLVTVSS

SEQ ID NO: 938 - protein, 108 aa, Artificial Sequence; identical to SEQ ID NO: 10
  Description of Artificial Sequence: Synthetic polypeptide

SEQ ID NO: 939 - protein, 124 aa, Artificial Sequence
  Description of Artificial Sequence: Synthetic polypeptide
EVQLLESGGGLVQPGGSLRLSCAASGFTFSQYGMWWVRQAPGKGLEWVSYIYPSGGGTYYADSVKGRFTISRDNSKNTLYLQMNSLRAEDTAVYYCAKDRAYGDYVGWNGFDYWGQGTLVTVSS

SEQ ID NO: 940 - protein, 108 aa, Artificial Sequence; identical to SEQ ID NO: 10
  Description of Artificial Sequence: Synthetic polypeptide

SEQ ID NO: 941 - protein, 124 aa, Artificial Sequence
  Description of Artificial Sequence: Synthetic polypeptide
EVQLLESGGGLVQPGGSLRLSCAASGFTFSQYMMIWVRQAPGKGLEWVSYIVPSGGTTGYADSVKGRFTISRDNSKNTLYLQMNSLRAEDTAVYYCAKDRAYGDYVGWNGFDYWGQGTLVTVSS

SEQ ID NO: 942 - protein, 108 aa, Artificial Sequence; identical to SEQ ID NO: 10
  Description of Artificial Sequence: Synthetic polypeptide

SEQ ID NO: 943 - protein, 124 aa, Artificial Sequence
  Description of Artificial Sequence: Synthetic polypeptide
EVQLLESGGGLVQPGGSLRLSCAASGFTFSQYPMFWVRQAPGKGLEWVSYIVPSGGYTSYADSVKGRFTISRDNSKNTLYLQMNSLRAEDTAVYYCAKDRAYGDYVGWNGFDYWGQGTLVTVSS

SEQ ID NO: 944 - protein, 108 aa, Artificial Sequence; identical to SEQ ID NO: 10
  Description of Artificial Sequence: Synthetic polypeptide

SEQ ID NO: 945 - protein, 124 aa, Artificial Sequence
  Description of Artificial Sequence: Synthetic polypeptide
EVQLLESGGGLVQPGGSLRLSCAASGFTFSQYPMIWVRQAPGKGLEWVSYIVPSGGWTSYADSVKGRFTISRDNSKNTLYLQMNSLRAEDTAVYYCAKDRAYGDYVGWNGFDYWGQGTLVTVSS

SEQ ID NO: 946 - protein, 108 aa, Artificial Sequence; identical to SEQ ID NO: 10
  Description of Artificial Sequence: Synthetic polypeptide

SEQ ID NO: 947 - protein, 124 aa, Artificial Sequence
  Description of Artificial Sequence: Synthetic polypeptide
EVQLLESGGGLVQPGGSLRLSCAASGFTFSQYPMMWVRQAPGKGLEWVSYIYPSGGATYYADSVKGRFTISRDNSKNTLYLQMNSLRAEDTAVYYCAKDRAYGDYVGWNGFDYWGQGTLVTVSS

SEQ ID NO: 948 - protein, 108 aa, Artificial Sequence; identical to SEQ ID NO: 10
  Description of Artificial Sequence: Synthetic polypeptide

SEQ ID NO: 949 - protein, 124 aa, Artificial Sequence
  Description of Artificial Sequence: Synthetic polypeptide
EVQLLESGGGLVQPGGSLRLSCAASGFTFSQYPMMWVRQAPGKGLEWVSYIYPSGGGTYYADSVKGRFTISRDNSKNTLYLQMNSLRAEDTAVYYCAKDRAYGDYVGWNGFDYWGQGTLVTVSS

SEQ ID NO: 950 - protein, 108 aa, Artificial Sequence; identical to SEQ ID NO: 10
  Description of Artificial Sequence: Synthetic polypeptide

SEQ ID NO: 951 - protein, 124 aa, Artificial Sequence
  Description of Artificial Sequence: Synthetic polypeptide
EVQLLESGGGLVQPGGSLRLSCAASGFTFSQYPMWWVRQAPGKGLEWVSSISPSGGATYYADSVKGRFTISRDNSKNTLYLQMNSLRAEDTAVYYCAKDRAYGDYVGWNGFDYWGQGTLVTVSS

SEQ ID NO: 952 - protein, 108 aa, Artificial Sequence; identical to SEQ ID NO: 10
  Description of Artificial Sequence: Synthetic polypeptide

SEQ ID NO: 953 - protein, 124 aa, Artificial Sequence
  Description of Artificial Sequence: Synthetic polypeptide
EVQLLESGGGLVQPGGSLRLSCAASGFTFSQYPMWWVRQAPGKGLEWVSSIYPSGGGTFYADSVKGRFTISRDNSKNTLYLQMNSLRAEDTAVYYCAKDRAYGDYVGWNGFDYWGQGTLVTVSS

SEQ ID NO: 954 - protein, 108 aa, Artificial Sequence; identical to SEQ ID NO: 10
  Description of Artificial Sequence: Synthetic polypeptide

SEQ ID NO: 955 - protein, 124 aa, Artificial Sequence
  Description of Artificial Sequence: Synthetic polypeptide
EVQLLESGGGLVQPGGSLRLSCAASGFTFSQYPMWWVRQAPGKGLEWVSSIYSSGGATYYADSVKGRFTISRDNSKNTLYLQMNSLRAEDTAVYYCAKDRAYGDYVGWNGFDYWGQGTLVTVSS

SEQ ID NO: 956 - protein, 108 aa, Artificial Sequence; identical to SEQ ID NO: 10
  Description of Artificial Sequence: Synthetic polypeptide

SEQ ID NO: 957 - protein, 124 aa, Artificial Sequence
  Description of Artificial Sequence: Synthetic polypeptide
EVQLLESGGGLVQPGGSLRLSCAASGFTFSQYPMWWVRQAPGKGLEWVSVIYPSGGFTSYADSVKGRFTISRDNSKNTLYLQMNSLRAEDTAVYYCAKDRAYGDYVGWNGFDYWGQGTLVTVSS

SEQ ID NO: 958 - protein, 108 aa, Artificial Sequence; identical to SEQ ID NO: 10
  Description of Artificial Sequence: Synthetic polypeptide

SEQ ID NO: 959 - protein, 124 aa, Artificial Sequence
  Description of Artificial Sequence: Synthetic polypeptide
EVQLLESGGGLVQPGGSLRLSCAASGFTFSQYPMWWVRQAPGKGLEWVSVIYPSGGYTGYADSVKGRFTISRDNSKNTLYLQMNSLRAEDTAVYYCAKDRAYGDYVGWNGFDYWGQGTLVTVSS

SEQ ID NO: 960 - protein, 108 aa, Artificial Sequence; identical to SEQ ID NO: 10
  Description of Artificial Sequence: Synthetic polypeptide

SEQ ID NO: 961 - protein, 124 aa, Artificial Sequence
  Description of Artificial Sequence: Synthetic polypeptide
EVQLLESGGGLVQPGGSLRLSCAASGFTFSQYQMWWVRQAPGKGLEWVSVIYPSGGATYYADSVKGRFTISRDNSKNTLYLQMNSLRAEDTAVYYCAKDRAYGDYVGWNGFDYWGQGTLVTVSS

SEQ ID NO: 962 - protein, 108 aa, Artificial Sequence; identical to SEQ ID NO: 10
  Description of Artificial Sequence: Synthetic polypeptide

SEQ ID NO: 963 - protein, 124 aa, Artificial Sequence
  Description of Artificial Sequence: Synthetic polypeptide
EVQLLESGGGLVQPGGSLRLSCAASGFTFSQYSMIWVRQAPGKGLEWVSYIVPSGGYTSYADSVKGRFTISRDNSKNTLYLQMNSLRAEDTAVYYCAKDRAYGDYVGWNGFDYWGQGTLVTVSS

SEQ ID NO: 964 - protein, 108 aa, Artificial Sequence; identical to SEQ ID NO: 10
  Description of Artificial Sequence: Synthetic polypeptide

SEQ ID NO: 965 - protein, 124 aa, Artificial Sequence
  Description of Artificial Sequence: Synthetic polypeptide
EVQLLESGGGLVQPGGSLRLSCAASGFTFSQYSMWWVRQAPGKGLEWVSSIVPSGGATFYADSVKGRFTISRDNSKNTLYLQMNSLRAEDTAVYYCAKDRAYGDYVGWNGFDYWGQGTLVTVSS

SEQ ID NO: 966 - protein, 108 aa, Artificial Sequence; identical to SEQ ID NO: 10
  Description of Artificial Sequence: Synthetic polypeptide

SEQ ID NO: 967 - protein, 124 aa, Artificial Sequence
  Description of Artificial Sequence: Synthetic polypeptide
EVQLLESGGGLVQPGGSLRLSCAASGFTFSQYSMWWVRQAPGKGLEWVSVIYSSGGATFYADSVKGRFTISRDNSKNTLYLQMNSLRAEDTAVYYCAKDRAYGDYVGWNGFDYWGQGTLVTVSS

SEQ ID NO: 968 - protein, 108 aa, Artificial Sequence; identical to SEQ ID NO: 10
  Description of Artificial Sequence: Synthetic polypeptide

SEQ ID NO: 969 - protein, 124 aa, Artificial Sequence
  Description of Artificial Sequence: Synthetic polypeptide
EVQLLESGGGLVQPGGSLRLSCAASGFTFSQYSMWWVRQAPGKGLEWVSVIYSSGSATFYADSVKGRFTISRDNSKNTLYLQMNSLRAEDTAVYYCAKDRAYGDYVGWNGFDYWGQGTLVTVSS

SEQ ID NO: 970 - protein, 108 aa, Artificial Sequence; identical to SEQ ID NO: 10
  Description of Artificial Sequence: Synthetic polypeptide

SEQ ID NO: 971 - protein, 124 aa, Artificial Sequence
  Description of Artificial Sequence: Synthetic polypeptide
EVQLLESGGGLVQPGGSLRLSCAASGFTFSQYWMWWVRQAPGKGLEWVSVISSSGGGTYYADSVKGRFTISRDNSKNTLYLQMNSLRAEDTAVYYCAKDRAYGDYVGWNGFDYWGQGTLVTVSS

SEQ ID NO: 972 - protein, 108 aa, Artificial Sequence; identical to SEQ ID NO: 10
  Description of Artificial Sequence: Synthetic polypeptide

SEQ ID NO: 973 - protein, 124 aa, Artificial Sequence
  Description of Artificial Sequence: Synthetic polypeptide
EVQLLESGGGLVQPGGSLRLSCAASGFTFSQYWMWWVRQAPGKGLEWVSVIVPSGGKTFYADSVKGRFTISRDNSKNTLYLQMNSLRAEDTAVYYCAKDRAYGDYVGWNGFDYWGQGTLVTVSS

SEQ ID NO: 974 - protein, 108 aa, Artificial Sequence; identical to SEQ ID NO: 10
  Description of Artificial Sequence: Synthetic polypeptide

SEQ ID NO: 975 - protein, 124 aa, Artificial Sequence
  Description of Artificial Sequence: Synthetic polypeptide
EVQLLESGGGLVQPGGSLRLSCAASGFTFSRYAMIWVRQAPGKGLEWVSYISPSGGFTDYADSVKGRFTISRDNSKNTLYLQMNSLRAEDTAVYYCAKDRAYGDYVGWNGFDYWGQGTLVTVSS

SEQ ID NO: 976 - protein, 108 aa, Artificial Sequence; identical to SEQ ID NO: 10
  Description of Artificial Sequence: Synthetic polypeptide

SEQ ID NO: 977 - protein, 124 aa, Artificial Sequence
  Description of Artificial Sequence: Synthetic polypeptide
EVQLLESGGGLVQPGGSLRLSCAASGFTFSRYAMMWVRQAPGKGLEWVSYISPSGGFTDYADSVKGRFTISRDNSKNTLYLQMNSLRAEDTAVYYCAKDRAYGDYVGWNGFDYWGQGTLVTVSS

SEQ ID NO: 978 - protein, 108 aa, Artificial Sequence; identical to SEQ ID NO: 10
  Description of Artificial Sequence: Synthetic polypeptide

SEQ ID NO: 979 - protein, 124 aa, Artificial Sequence
  Description of Artificial Sequence: Synthetic polypeptide
EVQLLESGGGLVQPGGSLRLSCAASGFTFSRYAMWWVRQAPGKGLEWVSSIYPSGGGTFYADSVKGRFTISRDNSKNTLYLQMNSLRAEDTAVYYCAKDRAYGDYVGWNGFDYWGQGTLVTVSS

SEQ ID NO: 980 - protein, 108 aa, Artificial Sequence; identical to SEQ ID NO: 10
  Description of Artificial Sequence: Synthetic polypeptide

SEQ ID NO: 981 - protein, 124 aa, Artificial Sequence
  Description of Artificial Sequence: Synthetic polypeptide
EVQLLESGGGLVQPGGSLRLSCAASGFTFSRYAMWWVRQAPGKGLEWVSYIVPSGGYTDYADSVKGRFTISRDNSKNTLYLQMNSLRAEDTAVYYCAKDRAYGDYVGWNGFDYWGQGTLVTVSS

SEQ ID NO: 982 - protein, 108 aa, Artificial Sequence; identical to SEQ ID NO: 10
  Description of Artificial Sequence: Synthetic polypeptide

SEQ ID NO: 983 - protein, 124 aa, Artificial Sequence
  Description of Artificial Sequence: Synthetic polypeptide
EVQLLESGGGLVQPGGSLRLSCAASGFTFSRYDMFWVRQAPGKGLEWVSSISPSGGGTYYADSVKGRFTISRDNSKNTLYLQMNSLRAEDTAVYYCAKDRAYGDYVGWNGFDYWGQGTLVTVSS

SEQ ID NO: 984 - protein, 108 aa, Artificial Sequence; identical to SEQ ID NO: 10
  Description of Artificial Sequence: Synthetic polypeptide

SEQ ID NO: 985 - protein, 124 aa, Artificial Sequence
  Description of Artificial Sequence: Synthetic polypeptide
EVQLLESGGGLVQPGGSLRLSCAASGFTFSRYDMWWVRQAPGKGLEWVSSISSSGGFTGYADSVKGRFTISRDNSKNTLYLQMNSLRAEDTAVYYCAKDRAYGDYVGWNGFDYWGQGTLVTVSS

SEQ ID NO: 986 - protein, 108 aa, Artificial Sequence; identical to SEQ ID NO: 10
  Description of Artificial Sequence: Synthetic polypeptide

SEQ ID NO: 987 - protein, 124 aa, Artificial Sequence
  Description of Artificial Sequence: Synthetic polypeptide
EVQLLESGGGLVQPGGSLRLSCAASGFTFSRYDMWWVRQAPGKGLEWVSVISPSGGATFYADSVKGRFTISRDNSKNTLYLQMNSLRAEDTAVYYCAKDRAYGDYVGWNGFDYWGQGTLVTVSS

SEQ ID NO: 988 - protein, 108 aa, Artificial Sequence; identical to SEQ ID NO: 10
  Description of Artificial Sequence: Synthetic polypeptide

SEQ ID NO: 989 - protein, 124 aa, Artificial Sequence
  Description of Artificial Sequence: Synthetic polypeptide
EVQLLESGGGLVQPGGSLRLSCAASGFTFSRYDMWWVRQAPGKGLEWVSVIYPSGGHTMYADSVKGRFTISRDNSKNTLYLQMNSLRAEDTAVYYCAKDRAYGDYVGWNGFDYWGQGTLVTVSS

SEQ ID NO: 990 - protein, 108 aa, Artificial Sequence; identical to SEQ ID NO: 10
  Description of Artificial Sequence: Synthetic polypeptide

SEQ ID NO: 991 - protein, 124 aa, Artificial Sequence
  Description of Artificial Sequence: Synthetic polypeptide
EVQLLESGGGLVQPGGSLRLSCAASGFTFSRYDMWWVRQAPGKGLEWVSWISPSGGGTQYADSVKGRFTISRDNSKNTLYLQMNSLRAEDTAVYYCAKDRAYGDYVGWNGFDYWGQGTLVTVSS

SEQ ID NO: 992 - protein, 108 aa, Artificial Sequence; identical to SEQ ID NO: 10
  Description of Artificial Sequence: Synthetic polypeptide

SEQ ID NO: 993 - protein, 124 aa, Artificial Sequence
  Description of Artificial Sequence: Synthetic polypeptide
EVQLLESGGGLVQPGGSLRLSCAASGFTFSRYDMWWVRQAPGKGLEWVSYIVPSGGFTSYADSVKGRFTISRDNSKNTLYLQMNSLRAEDTAVYYCAKDRAYGDYVGWNGFDYWGQGTLVTVSS

SEQ ID NO: 994 - protein, 108 aa, Artificial Sequence; identical to SEQ ID NO: 10
  Description of Artificial Sequence: Synthetic polypeptide

SEQ ID NO: 995 - protein, 124 aa, Artificial Sequence
  Description of Artificial Sequence: Synthetic polypeptide
EVQLLESGGGLVQPGGSLRLSCAASGFTFSRYHMWWVRQAPGKGLEWVSYISPSGGSTLYADSVKGRFTISRDNSKNTLYLQMNSLRAEDTAVYYCAKDRAYGDYVGWNGFDYWGQGTLVTVSS

SEQ ID NO: 996 - protein, 108 aa, Artificial Sequence; identical to SEQ ID NO: 10
  Description of Artificial Sequence: Synthetic polypeptide

SEQ ID NO: 997 - protein, 124 aa, Artificial Sequence
  Description of Artificial Sequence: Synthetic polypeptide
EVQLLESGGGLVQPGGSLRLSCAASGFTFSRYMMIWVRQAPGKGLEWVSGIYPSGGWTDYADSVKGRFTISRDNSKNTLYLQMNSLRAEDTAVYYCAKDRAYGDYVGWNGFDYWGQGTLVTVSS

SEQ ID NO: 998 - protein, 108 aa, Artificial Sequence; identical to SEQ ID NO: 10
  Description of Artificial Sequence: Synthetic polypeptide

SEQ ID NO: 999 - protein, 124 aa, Artificial Sequence
  Description of Artificial Sequence: Synthetic polypeptide
EVQLLESGGGLVQPGGSLRLSCAASGFTFSRYNMWWVRQAPGKGLEWVSVIYPSGGATYYADSVKGRFTISRDNSKNTLYLQMNSLRAEDTAVYYCAKDRAYGDYVGWNGFDYWGQGTLVTVSS

SEQ ID NO: 1000 - protein, 108 aa, Artificial Sequence; identical to SEQ ID NO: 10
  Description of Artificial Sequence: Synthetic polypeptide

SEQ ID NO: 1001 - protein, 124 aa, Artificial Sequence
  Description of Artificial Sequence: Synthetic polypeptide
EVQLLESGGGLVQPGGSLRLSCAASGFTFSRYPMFWVRQAPGKGLEWVSYISPSGGYTSYADSVKGRFTISRDNSKNTLYLQMNSLRAEDTAVYYCAKDRAYGDYVGWNGFDYWGQGTLVTVSS

SEQ ID NO: 1002 - protein, 108 aa, Artificial Sequence; identical to SEQ ID NO: 10
  Description of Artificial Sequence: Synthetic polypeptide

SEQ ID NO: 1003 - protein, 124 aa, Artificial Sequence
  Description of Artificial Sequence: Synthetic polypeptide
EVQLLESGGGLVQPGGSLRLSCAASGFTFSRYPMFWVRQAPGKGLEWVSYIVPSGGYTDYADSVKGRFTISRDNSKNTLYLQMNSLRAEDTAVYYCAKDRAYGDYVGWNGFDYWGQGTLVTVSS

SEQ ID NO: 1004 - protein, 108 aa, Artificial Sequence; identical to SEQ ID NO: 10
  Description of Artificial Sequence: Synthetic polypeptide

SEQ ID NO: 1005 - protein, 124 aa, Artificial Sequence
  Description of Artificial Sequence: Synthetic polypeptide
EVQLLESGGGLVQPGGSLRLSCAASGFTFSRYPMIWVRQAPGKGLEWVSYIYPSGGGTYYADSVKGRFTISRDNSKNTLYLQMNSLRAEDTAVYYCAKDRAYGDYVGWNGFDYWGQGTLVTVSS

SEQ ID NO: 1006 - protein, 108 aa, Artificial Sequence; identical to SEQ ID NO: 10
  Description of Artificial Sequence: Synthetic polypeptide

SEQ ID NO: 1007 - protein, 124 aa, Artificial Sequence
  Description of Artificial Sequence: Synthetic polypeptide
EVQLLESGGGLVQPGGSLRLSCAASGFTFSRYPMVWVRQAPGKGLEWVSYISPSGGYTGYADSVKGRFTISRDNSKNTLYLQMNSLRAEDTAVYYCAKDRAYGDYVGWNGFDYWGQGTLVTVSS

SEQ ID NO: 1008 - protein, 108 aa, Artificial Sequence; identical to SEQ ID NO: 10
  Description of Artificial Sequence: Synthetic polypeptide

SEQ ID NO: 1009 - protein, 124 aa, Artificial Sequence
  Description of Artificial Sequence: Synthetic polypeptide
EVQLLESGGGLVQPGGSLRLSCAASGFTFSRYPMWWVRQAPGKGLEWVSSISSSGGGTYYADSVKGRFTISRDNSKNTLYLQMNSLRAEDTAVYYCAKDRAYGDYVGWNGFDYWGQGTLVTVSS

SEQ ID NO: 1010 - protein, 108 aa, Artificial Sequence; identical to SEQ ID NO: 10
  Description of Artificial Sequence: Synthetic polypeptide

SEQ ID NO: 1011 - protein, 124 aa, Artificial Sequence
  Description of Artificial Sequence: Synthetic polypeptide
EVQLLESGGGLVQPGGSLRLSCAASGFTFSRYPMWWVRQAPGKGLEWVSSIYPSGGATFYADSVKGRFTISRDNSKNTLYLQMNSLRAEDTAVYYCAKDRAYGDYVGWNGFDYWGQGTLVTVSS

SEQ ID NO: 1012 - protein, 108 aa, Artificial Sequence; identical to SEQ ID NO: 10
  Description of Artificial Sequence: Synthetic polypeptide

SEQ ID NO: 1013 - protein, 124 aa, Artificial Sequence
  Description of Artificial Sequence: Synthetic polypeptide
EVQLLESGGGLVQPGGSLRLSCAASGFTFSRYPMWWVRQAPGKGLEWVSVIYPSGGATYYADSVKGRFTISRDNSKNTLYLQMNSLRAEDTAVYYCAKDRAYGDYVGWNGFDYWGQGTLVTVSS

SEQ ID NO: 1014 - protein, 108 aa, Artificial Sequence; identical to SEQ ID NO: 10
  Description of Artificial Sequence: Synthetic polypeptide

SEQ ID NO: 1015 - protein, 124 aa, Artificial Sequence
  Description of Artificial Sequence: Synthetic polypeptide
EVQLLESGGGLVQPGGSLRLSCAASGFTFSRYPMWWVRQAPGKGLEWVSVIYPSGGTTFYADSVKGRFTISRDNSKNTLYLQMNSLRAEDTAVYYCAKDRAYGDYVGWNGFDYWGQGTLVTVSS

SEQ ID NO: 1016 - protein, 108 aa, Artificial Sequence; identical to SEQ ID NO: 10
  Description of Artificial Sequence: Synthetic polypeptide

SEQ ID NO: 1017 - protein, 124 aa, Artificial Sequence
  Description of Artificial Sequence: Synthetic polypeptide
EVQLLESGGGLVQPGGSLRLSCAASGFTFSRYPMWWVRQAPGKGLEWVSVIYSSGGYTGYADSVKGRFTISRDNSKNTLYLQMNSLRAEDTAVYYCAKDRAYGDYVGWNGFDYWGQGTLVTVSS

SEQ ID NO: 1018 - protein, 108 aa, Artificial Sequence; identical to SEQ ID NO: 10
  Description of Artificial Sequence: Synthetic polypeptide

SEQ ID NO: 1019 - protein, 124 aa, Artificial Sequence
  Description of Artificial Sequence: Synthetic polypeptide
EVQLLESGGGLVQPGGSLRLSCAASGFTFSRYPMWWVRQAPGKGLEWVSYIGSSGGGTFYADSVKGRFTISRDNSKNTLYLQMNSLRAEDTAVYYCAKDRAYGDYVGWNGFDYWGQGTLVTVSS

SEQ ID NO: 1020 - protein, 108 aa, Artificial Sequence; identical to SEQ ID NO: 10
  Description of Artificial Sequence: Synthetic polypeptide

SEQ ID NO: 1021 - protein, 124 aa, Artificial Sequence
  Description of Artificial Sequence: Synthetic polypeptide
EVQLLESGGGLVQPGGSLRLSCAASGFTFSRYPMWWVRQAPGKGLEWVSYISPSGGGTLYADSVKGRFTISRDNSKNTLYLQMNSLRAEDTAVYYCAKDRAYGDYVGWNGFDYWGQGTLVTVSS

SEQ ID NO: 1022 - protein, 108 aa, Artificial Sequence; identical to SEQ ID NO: 10
  Description of Artificial Sequence: Synthetic polypeptide

SEQ ID NO: 1023 - protein, 124 aa, Artificial Sequence
  Description of Artificial Sequence: Synthetic polypeptide
EVQLLESGGGLVQPGGSLRLSCAASGFTFSRYPMWWVRQAPGKGLEWVSYISPSGGMTSYADSVKGRFTISRDNSKNTLYLQMNSLRAEDTAVYYCAKDRAYGDYVGWNGFDYWGQGTLVTVSS

SEQ ID NO: 1024 - protein, 108 aa, Artificial Sequence; identical to SEQ ID NO: 10
  Description of Artificial Sequence: Synthetic polypeptide

SEQ ID NO: 1025 - protein, 124 aa, Artificial Sequence
  Description of Artificial Sequence: Synthetic polypeptide
EVQLLESGGGLVQPGGSLRLSCAASGFTFSRYPMWWVRQAPGKGLEWVSYISSSGGGTFYADSVKGRFTISRDNSKNTLYLQMNSLRAEDTAVYYCAKDRAYGDYVGWNGFDYWGQGTLVTVSS

SEQ ID NO: 1026 - protein, 108 aa, Artificial Sequence; identical to SEQ ID NO: 10
  Description of Artificial Sequence: Synthetic polypeptide

SEQ ID NO: 1027 - protein, 124 aa, Artificial Sequence
  Description of Artificial Sequence: Synthetic polypeptide
EVQLLESGGGLVQPGGSLRLSCAASGFTFSRYPMWWVRQAPGKGLEWVSYISSSGGGTLYADSVKGRFTISRDNSKNTLYLQMNSLRAEDTAVYYCAKDRAYGDYVGWNGFDYWGQGTLVTVSS

SEQ ID NO: 1028 - protein, 108 aa, Artificial Sequence; identical to SEQ ID NO: 10
  Description of Artificial Sequence: Synthetic polypeptide

SEQ ID NO: 1029 - protein, 124 aa, Artificial Sequence
  Description of Artificial Sequence: Synthetic polypeptide
EVQLLESGGGLVQPGGSLRLSCAASGFTFSRYPMWWVRQAPGKGLEWVSYIVPSGGATYYADSVKGRFTISRDNSKNTLYLQMNSLRAEDTAVYYCAKDRAYGDYVGWNGFDYWGQGTLVTVSS

SEQ ID NO: 1030 - protein, 108 aa, Artificial Sequence; identical to SEQ ID NO: 10
  Description of Artificial Sequence: Synthetic polypeptide

SEQ ID NO: 1031 - protein, 124 aa, Artificial Sequence
  Description of Artificial Sequence: Synthetic polypeptide
EVQLLESGGGLVQPGGSLRLSCAASGFTFSRYPMWWVRQAPGKGLEWVSYIVPSGGFTDYAHSVKGRFTISRDNSKNTLYLQMNSLRAEDTAVYYCAKDRAYGDYVGWNGFDYWGQGTLVTVSS

SEQ ID NO: 1032 - protein, 108 aa, Artificial Sequence; identical to SEQ ID NO: 10
  Description of Artificial Sequence: Synthetic polypeptide

SEQ ID NO: 1033 - protein, 124 aa, Artificial Sequence
  Description of Artificial Sequence: Synthetic polypeptide
EVQLLESGGGLVQPGGSLRLSCAASGFTFSRYPMWWVRQAPGKGLEWVSYIVPSGGTTYYADSVKGRFTISRDNSKNTLYLQMNSLRAEDTAVYYCAKDRAYGDYVGWNGFDYWGQGTLVTVSS

SEQ ID NO: 1034 - protein, 108 aa, Artificial Sequence; identical to SEQ ID NO: 10
  Description of Artificial Sequence: Synthetic polypeptide

SEQ ID NO: 1035 - protein, 124 aa, Artificial Sequence
  Description of Artificial Sequence: Synthetic polypeptide
EVQLLESGGGLVQPGGSLRLSCAASGFTFSRYPMWWVRQAPGKGLEWVSYIYPSGGATFYADSVKGRFTISRDNSKNTLYLQMNSLRAEDTAVYYCAKDRAYGDYVGWNGFDYWGQGTLVTVSS

SEQ ID NO: 1036 - protein, 108 aa, Artificial Sequence; identical to SEQ ID NO: 10
  Description of Artificial Sequence: Synthetic polypeptide

SEQ ID NO: 1037 - protein, 124 aa, Artificial Sequence
  Description of Artificial Sequence: Synthetic polypeptide
EVQLLESGGGLVQPGGSLRLSCAASGFTFSRYPMWWVRQAPGKGLEWVSYIYSSGGKTFYADSVKGRFTISRDNSKNTLYLQMNSLRAEDTAVYYCAKDRAYGDYVGWNGFDYWGQGTLVTVSS

SEQ ID NO: 1038 - protein, 108 aa, Artificial Sequence; identical to SEQ ID NO: 10
  Description of Artificial Sequence: Synthetic polypeptide

SEQ ID NO: 1039 - protein, 124 aa, Artificial Sequence
  Description of Artificial Sequence: Synthetic polypeptide
EVQLLESGGGLVQPGGSLRLSCAASGFTFSRYSMWWVRQAPGKGLEWVSSIYPSGGATFYADSVKGRFTISRDNSKNTLYLQMNSLRAEDTAVYYCAKDRAYGDYVGWNGFDYWGQGTLVTVSS

SEQ ID NO: 1040 - protein, 108 aa, Artificial Sequence; identical to SEQ ID NO: 10
  Description of Artificial Sequence: Synthetic polypeptide

SEQ ID NO: 1041 - protein, 124 aa, Artificial Sequence
  Description of Artificial Sequence: Synthetic polypeptide
EVQLLESGGGLVQPGGSLRLSCAASGFTFSRYSMWWVRQAPGKGLEWVSVIYPSGGYTGYADSVKGRFTISRDNSKNTLYLQMNSLRAEDTAVYYCAKDRAYGDYVGWNGFDYWGQGTLVTVSS

SEQ ID NO: 1042 - protein, 108 aa, Artificial Sequence; identical to SEQ ID NO: 10
  Description of Artificial Sequence: Synthetic polypeptide

SEQ ID NO: 1043 - protein, 124 aa, Artificial Sequence
  Description of Artificial Sequence: Synthetic polypeptide
EVQLLESGGGLVQPGGSLRLSCAASGFTFSRYWMWWVRQAPGKGLEWVSVIVPSGGATFYADSVKGRFTISRDNSKNTLYLQMNSLRAEDTAVYYCAKDRAYGDYVGWNGFDYWGQGTLVTVSS

SEQ ID NO: 1044 - protein, 108 aa, Artificial Sequence; identical to SEQ ID NO: 10
  Description of Artificial Sequence: Synthetic polypeptide

SEQ ID NO: 1045 - protein, 124 aa, Artificial Sequence
  Description of Artificial Sequence: Synthetic polypeptide
EVQLLESGGGLVQPGGSLRLSCAASGFTFSRYYMMWVRQAPGKGLEWVSYISPSGGATYYADSVKGRFTISRDNSKNTLYLQMNSLRAEDTAVYYCAKDRAYGDYVGWNGFDYWGQGTLVTVSS

SEQ ID NO: 1046 - protein, 108 aa, Artificial Sequence; identical to SEQ ID NO: 10
  Description of Artificial Sequence: Synthetic polypeptide

SEQ ID NO: 1047 - protein, 124 aa, Artificial Sequence
  Description of Artificial Sequence: Synthetic polypeptide
EVQLLESGGGLVQPGGSLRLSCAASGFTFSSYDMIWVRQAPGKGLEWVSWIGPSGGSTMYADSVKGRFTISRDNSKNTLYLQMNSLRAEDTAVYYCAKDRAYGDYVGWNGFDYWGQGTLVTVSS

SEQ ID NO: 1048 - protein, 108 aa, Artificial Sequence; identical to SEQ ID NO: 10
  Description of Artificial Sequence: Synthetic polypeptide

SEQ ID NO: 1049 - protein, 124 aa, Artificial Sequence
  Description of Artificial Sequence: Synthetic polypeptide
EVQLLESGGGLVQPGGSLRLSCAASGFTFSSYDMWWVRQAPGKGLEWVSSISSSVGATYYADSVKGRFTISRDNSKNTLYLQMNSLRAEDTAVYYCAKDRAYGDYVGWNGFDYWGQGTLVTVSS

SEQ ID NO: 1050 - protein, 108 aa, Artificial Sequence; identical to SEQ ID NO: 10
  Description of Artificial Sequence: Synthetic polypeptide

SEQ ID NO: 1051 - protein, 124 aa, Artificial Sequence
  Description of Artificial Sequence: Synthetic polypeptide
EVQLLESGGGLVQPGGSLRLSCAASGFTFSSYDMWWVRQAPGKGLEWVSVIGPSGGGTFYADSVKGRFTISRDNSKNTLYLQMNSLRAEDTAVYYCAKDRAYGDYVGWNGFDYWGQGTLVTVSS

SEQ ID NO: 1052 - protein, 108 aa, Artificial Sequence; identical to SEQ ID NO: 10
  Description of Artificial Sequence: Synthetic polypeptide

SEQ ID NO: 1053 - protein, 124 aa, Artificial Sequence
  Description of Artificial Sequence: Synthetic polypeptide
EVQLLESGGGLVQPGGSLRLSCAASGFTFSSYDMWWVRQAPGKGLEWVSVISPSGGYTGYADSVKGRFTISRDNSKNTLYLQMNSLRAEDTAVYYCAKDRAYGDYVGWNGFDYWGQGTLVTVSS

SEQ ID NO: 1054 - protein, 108 aa, Artificial Sequence; identical to SEQ ID NO: 10
  Description of Artificial Sequence: Synthetic polypeptide

SEQ ID NO: 1055 - protein, 124 aa, Artificial Sequence
  Description of Artificial Sequence: Synthetic polypeptide
EVQLLESGGGLVQPGGSLRLSCAASGFTFSSYDMWWVRQAPGKGLEWVSVIYPSGGRTYYADSVKGRFTISRDNSKNTLYLQMNSLRAEDTAVYYCAKDRAYGDYVGWNGFDYWGQGTLVTVSS

SEQ ID NO: 1056 - protein, 108 aa, Artificial Sequence; identical to SEQ ID NO: 10
  Description of Artificial Sequence: Synthetic polypeptide

SEQ ID NO: 1057 - protein, 124 aa, Artificial Sequence
  Description of Artificial Sequence: Synthetic polypeptide
EVQLLESGGGLVQPGGSLRLSCAASGFTFSSYDMWWVRQAPGKGLEWVSVIYSSGGFTGYADSVKGRFTISRDNSKNTLYLQMNSLRAEDTAVYYCAKDRAYGDYVGWNGFDYWGQGTLVTVSS

SEQ ID NO: 1058 - protein, 108 aa, Artificial Sequence; identical to SEQ ID NO: 10
  Description of Artificial Sequence: Synthetic polypeptide

SEQ ID NO: 1059 - protein, 124 aa, Artificial Sequence
  Description of Artificial Sequence: Synthetic polypeptide
EVQLLESGGGLVQPGGSLRLSCAASGFTFSSYDMWWVRQAPGKGLEWVSVIYSSGGTTFYADSVKGRFTISRDNSKNTLYLQMNSLRAEDTAVYYCAKDRAYGDYVGWNGFDYWGQGTLVTVSS

SEQ ID NO: 1060 - protein, 108 aa, Artificial Sequence; identical to SEQ ID NO: 10
  Description of Artificial Sequence: Synthetic polypeptide

SEQ ID NO: 1061 - protein, 124 aa, Artificial Sequence
  Description of Artificial Sequence: Synthetic polypeptide
EVQLLESGGGLVQPGGSLRLSCAASGFTFSSYDMWWVRQAPGKGLEWVSVIYSSGGYTGYADSVKGRFTISRDNSKNTLYLQMNSLRAEDTAVYYCAKDRAYGDYVGWNGFDYWGQGTLVTVSS

SEQ ID NO: 1062 - protein, 108 aa, Artificial Sequence; identical to SEQ ID NO: 10
  Description of Artificial Sequence: Synthetic polypeptide

SEQ ID NO: 1063 - protein, 124 aa, Artificial Sequence
  Description of Artificial Sequence: Synthetic polypeptide
EVQLLESGGGLVQPGGSLRLSCAASGFTFSSYEMWWVRQAPGKGLEWVSVIYSSGGATFYADSVKGRFTISRDNSKNTLYLQMNSLRAEDTAVYYCAKDRAYGDYVGWNGFDYWGQGTLVTVSS

SEQ ID NO: 1064 - protein, 108 aa, Artificial Sequence; identical to SEQ ID NO: 10
  Description of Artificial Sequence: Synthetic polypeptide

SEQ ID NO: 1065 - protein, 124 aa, Artificial Sequence
  Description of Artificial Sequence: Synthetic polypeptide
EVQLLESGGGLVQPGGSLRLSCAASGFTFSSYEMWWVRQAPGKGLEWVSYISSSGGGTYYADSVKGRFTISRDNSKNTLYLQMNSLRAEDTAVYYCAKDRAYGDYVGWNGFDYWGQGTLVTVSS

SEQ ID NO: 1066 - protein, 108 aa, Artificial Sequence; identical to SEQ ID NO: 10
  Description of Artificial Sequence: Synthetic polypeptide

SEQ ID NO: 1067 - protein, 124 aa, Artificial Sequence
  Description of Artificial Sequence: Synthetic polypeptide
EVQLLESGGGLVQPGGSLRLSCAASGFTFSSYMMIWVRQAPGKGLEWVSSISPSGGGTYYADSVKGRFTISRDNSKNTLYLQMNSLRAEDTAVYYCAKDRAYGDYVGWNGFDYWGQGTLVTVSS

SEQ ID NO: 1068 - protein, 108 aa, Artificial Sequence; identical to SEQ ID NO: 10
  Description of Artificial Sequence: Synthetic polypeptide

SEQ ID NO: 1069 - protein, 124 aa, Artificial Sequence
  Description of Artificial Sequence: Synthetic polypeptide
EVQLLESGGGLVQPGGSLRLSCAASGFTFSSYMMIWVRQAPGKGLEWVSSISPSGGWTSYADSVKGRFTISRDNSKNTLYLQMNSLRAEDTAVYYCAKDRAYGDYVGWNGFDYWGQGTLVTVSS

SEQ ID NO: 1070 - protein, 108 aa, Artificial Sequence; identical to SEQ ID NO: 10
  Description of Artificial Sequence: Synthetic polypeptide

SEQ ID NO: 1071 - protein, 124 aa, Artificial Sequence
  Description of Artificial Sequence: Synthetic polypeptide
EVQLLESGGGLVQPGGSLRLSCAASGFTFSSYMMIWVRQAPGKGLEWVSSIYPSGGYTSYADSVKGRFTISRDNSKNTLYLQMNSLRAEDTAVYYCAKDRAYGDYVGWNGFDYWGQGTLVTVSS

SEQ ID NO: 1072 - protein, 108 aa, Artificial Sequence; identical to SEQ ID NO: 10
  Description of Artificial Sequence: Synthetic polypeptide

SEQ ID NO: 1073 - protein, 124 aa, Artificial Sequence
  Description of Artificial Sequence: Synthetic polypeptide
EVQLLESGGGLVQPGGSLRLSCAASGFTFSSYNMWWVRQAPGKGLEWVSSISPSGGGTYYADSVKGRFTISRDNSKNTLYLQMNSLRAEDTAVYYCAKDRAYGDYVGWNGFDYWGQGTLVTVSS

SEQ ID NO: 1074 - protein, 108 aa, Artificial Sequence; identical to SEQ ID NO: 10
  Description of Artificial Sequence: Synthetic polypeptide

SEQ ID NO: 1075 - protein, 124 aa, Artificial Sequence
  Description of Artificial Sequence: Synthetic polypeptide
EVQLLESGGGLVQPGGSLRLSCAASGFTFSSYPMIWVRQAPGKGLEWVSYISSSGGFTDYADSVKGRFTISRDNSKNTLYLQMNSLRAEDTAVYYCAKDRAYGDYVGWNGFDYWGQGTLVTVSS

SEQ ID NO: 1076 - protein, 108 aa, Artificial Sequence; identical to SEQ ID NO: 10
  Description of Artificial Sequence: Synthetic polypeptide

SEQ ID NO: 1077 - protein, 124 aa, Artificial Sequence
  Description of Artificial Sequence: Synthetic polypeptide
EVQLLESGGGLVQPGGSLRLSCAASGFTFSSYPMMWVRQAPGKGLEWVSYIYSSGGGTFYADSVKGRFTISRDNSKNTLYLQMNSLRAEDTAVYYCAKDRAYGDYVGWNGFDYWGQGTLVTVSS

SEQ ID NO: 1078 - protein, 108 aa, Artificial Sequence; identical to SEQ ID NO: 10
  Description of Artificial Sequence: Synthetic polypeptide

SEQ ID NO: 1079 - protein, 124 aa, Artificial Sequence
  Description of Artificial Sequence: Synthetic polypeptide
EVQLLESGGGLVQPGGSLRLSCAASGFTFSSYPMWWVRQAPGKGLEWVSSISPSGGGTYYADSVKGRFTISRDNSKNTLYLQMNSLRAEDTAVYYCAKDRAYGDYVGWNGFDYWGQGTLVTVSS

SEQ ID NO: 1080 - protein, 108 aa, Artificial Sequence; identical to SEQ ID NO: 10
  Description of Artificial Sequence: Synthetic polypeptide

SEQ ID NO: 1081 - protein, 123 aa, Artificial Sequence
  Description of Artificial Sequence: Synthetic polypeptide
EVQLLESGGGLVQPGGSLRLSCAASGFTFSSYPMWWVRQAPGKGLEWVSSISPSGMTYYADSVKGRFTISRDNSKNTLYLQMNSLRAEDTAVYYCAKDRAYGDYVGWNGFDYWGQGTLVTVSS

SEQ ID NO: 1082 - protein, 108 aa, Artificial Sequence; identical to SEQ ID NO: 10
  Description of Artificial Sequence: Synthetic polypeptide

SEQ ID NO: 1083 - protein, 124 aa, Artificial Sequence
  Description of Artificial Sequence: Synthetic polypeptide
EVQLLESGGGLVQPGGSLRLSCAASGFTFSSYPMWWVRQAPGKGLEWVSSIYPSGGGTFYADSVKGRFTISRDNSKNTLYLQMNSLRAEDTAVYYCAKDRAYGDYVGWNGFDYWGQGTLVTVSS

SEQ ID NO: 1084 - protein, 108 aa, Artificial Sequence; identical to SEQ ID NO: 10
  Description of Artificial Sequence: Synthetic polypeptide

SEQ ID NO: 1085 - protein, 124 aa, Artificial Sequence
  Description of Artificial Sequence: Synthetic polypeptide
EVQLLESGGGLVQPGGSLRLSCAASGFTFSSYPMWWVRQAPGKGLEWVSYISSSGGGTYYADSVKGRFTISRDNSKNTLYLQMNSLRAEDTAVYYCAKDRAYGDYVGWNGFDYWGQGTLVTVSS

SEQ ID NO: 1086 - protein, 108 aa, Artificial Sequence; identical to SEQ ID NO: 10
  Description of Artificial Sequence: Synthetic polypeptide

SEQ ID NO: 1087 - protein, 124 aa, Artificial Sequence
  Description of Artificial Sequence: Synthetic polypeptide
EVQLLESGGGLVQPGGSLRLSCAASGFTFSSYPMWWVRQAPGKGLEWVSYIVPSGGATFYADSVKGRFTISRDNSKNTLYLQMNSLRAEDTAVYYCAKDRAYGDYVGWNGFDYWGQGTLVTVSS

SEQ ID NO: 1088 - protein, 108 aa, Artificial Sequence; identical to SEQ ID NO: 10
  Description of Artificial Sequence: Synthetic polypeptide

SEQ ID NO: 1089 - protein, 124 aa, Artificial Sequence
  Description of Artificial Sequence: Synthetic polypeptide
EVQLLESGGGLVQPGGSLRLSCAASGFTFSSYPMWWVRQAPGKGLEWVSYIVPSGGSTLYADSVKGRFTISRDNSKNTLYLQMNSLRAEDTAVYYCAKDRAYGDYVGWNGFDYWGQGTLVTVSS

SEQ ID NO: 1090 - protein, 108 aa, Artificial Sequence; identical to SEQ ID NO: 10
  Description of Artificial Sequence: Synthetic polypeptide

SEQ ID NO: 1091 - protein, 124 aa, Artificial Sequence
  Description of Artificial Sequence: Synthetic polypeptide
EVQLLESGGGLVQPGGSLRLSCAASGFTFSSYPMWWVRQAPGKGLEWVSYIVPSGGYTYYADSVKGRFTISRDNSKNTLYLQMNSLRAEDTAVYYCAKDRAYGDYVGWNGFDYWGQGTLVTVSS

SEQ ID NO: 1092 - protein, 108 aa, Artificial Sequence; identical to SEQ ID NO: 10
  Description of Artificial Sequence: Synthetic polypeptide

SEQ ID NO: 1093 - protein, 124 aa, Artificial Sequence
  Description of Artificial Sequence: Synthetic polypeptide
EVQLLESGGGLVQPGGSLRLSCAASGFTFSSYQMWWVRQAPGKGLEWVSSIYPSGGATFYADSVKGRFTISRDNSKNTLYLQMNSLRAEDTAVYYCAKDRAYGDYVGWNGFDYWGQGTLVTVSS

SEQ ID NO: 1094 - protein, 108 aa, Artificial Sequence; identical to SEQ ID NO: 10
  Description of Artificial Sequence: Synthetic polypeptide

SEQ ID NO: 1095 - protein, 124 aa, Artificial Sequence
  Description of Artificial Sequence: Synthetic polypeptide
EVQLLESGGGLVQPGGSLRLSCAASGFTFSSYSMWWVRQAPGKGLEWVSVIYSSGGYTGYADSVKGRFTISRDNSKNTLYLQMNSLRAEDTAVYYCAKDRAYGDYVGWNGFDYWGQGTLVTVSS

SEQ ID NO: 1096 - protein, 108 aa, Artificial Sequence; identical to SEQ ID NO: 10
  Description of Artificial Sequence: Synthetic polypeptide

SEQ ID NO: 1097 - protein, 124 aa, Artificial Sequence
  Description of Artificial Sequence: Synthetic polypeptide
EVQLLESGGGLVQPGGSLRLSCAASGFTFSTYAMIWVRQAPGKGLEWVSYIGPSGGFTDYADSVKGRFTISRDNSKNTLYLQMNSLRAEDTAVYYCAKDRAYGDYVGWNGFDYWGQGTLVTVSS

SEQ ID NO: 1098 - protein, 108 aa, Artificial Sequence; identical to SEQ ID NO: 10
  Description of Artificial Sequence: Synthetic polypeptide

SEQ ID NO: 1099 - protein, 124 aa, Artificial Sequence
  Description of Artificial Sequence: Synthetic polypeptide
EVQLLESGGGLVQPGGSLRLSCAASGFTFSTYAMWWVRQAPGKGLEWVSYISPSGGGTFYADSVKGRFTISRDNSKNTLYLQMNSLRAEDTAVYYCAKDRAYGDYVGWNGFDYWGQGTLVTVSS

SEQ ID NO: 1100 - protein, 108 aa, Artificial Sequence; identical to SEQ ID NO: 10
  Description of Artificial Sequence: Synthetic polypeptide

SEQ ID NO: 1101 - protein, 124 aa, Artificial Sequence
  Description of Artificial Sequence: Synthetic polypeptide
EVQLLESGGGLVQPGGSLRLSCAASGFTFSTYDMFWVRQAPGKGLEWVSSISSSGGATFYADSVKGRFTISRDNSKNTLYLQMNSLRAEDTAVYYCAKDRAYGDYVGWNGFDYWGQGTLVTVSS

SEQ ID NO: 1102 - protein, 108 aa, Artificial Sequence; identical to SEQ ID NO: 10
  Description of Artificial Sequence: Synthetic polypeptide

SEQ ID NO: 1103 - protein, 124 aa, Artificial Sequence
  Description of Artificial Sequence: Synthetic polypeptide
EVQLLESGGGLVQPGGSLRLSCAASGFTFSTYDMIWVRQAPGKGLEWVSYISPSGGYTGYADSVKGRFTISRDNSKNTLYLQMNSLRAEDTAVYYCAKDRAYGDYVGWNGFDYWGQGTLVTVSS

SEQ ID NO: 1104 - protein, 108 aa, Artificial Sequence; identical to SEQ ID NO: 10
  Description of Artificial Sequence: Synthetic polypeptide

SEQ ID NO: 1105 - protein, 124 aa, Artificial Sequence
  Description of Artificial Sequence: Synthetic polypeptide
EVQLLESGGGLVQPGGSLRLSCAASGFTFSTYDMIWVRQAPGKGLEWVSYISSSGGFTDYADSVKGRFTISRDNSKNTLYLQMNSLRAEDTAVYYCAKDRAYGDYVGWNGFDYWGQGTLVTVSS

SEQ ID NO: 1106 - protein, 108 aa, Artificial Sequence; identical to SEQ ID NO: 10
  Description of Artificial Sequence: Synthetic polypeptide

SEQ ID NO: 1107 - protein, 124 aa, Artificial Sequence
  Description of Artificial Sequence: Synthetic polypeptide
EVQLLESGGGLVQPGGSLRLSCAASGFTFSTYDMWWVRQAPGKGLEWVSVIYPSGGPTYYADSVKGRFTISRDNSKNTLYLQMNSLRAEDTAVYYCAKDRAYGDYVGWNGFDYWGQGTLVTVSS

SEQ ID NO: 1108 - protein, 108 aa, Artificial Sequence; identical to SEQ ID NO: 10
  Description of Artificial Sequence: Synthetic polypeptide

SEQ ID NO: 1109 - protein, 124 aa, Artificial Sequence
  Description of Artificial Sequence: Synthetic polypeptide
EVQLLESGGGLVQPGGSLRLSCAASGFTFSTYDMWWVRQAPGKGLEWVSYISSSGGGTFYADSVKGRFTISRDNSKNTLYLQMNSLRAEDTAVYYCAKDRAYGDYVGWNGFDYWGQGTLVTVSS

SEQ ID NO: 1110 - protein, 108 aa, Artificial Sequence; identical to SEQ ID NO: 10
  Description of Artificial Sequence: Synthetic polypeptide

SEQ ID NO: 1111 - protein, 124 aa, Artificial Sequence
  Description of Artificial Sequence: Synthetic polypeptide
EVQLLESGGGLVQPGGSLRLSCAASGFTFSTYEMWWVRQAPGKGLEWVSYISSSGGGTGYADSVKGRFTISRDNSKNTLYLQMNSLRAEDTAVYYCAKDRAYGDYVGWNGFDYWGQGTLVTVSS

SEQ ID NO: 1112 - protein, 108 aa, Artificial Sequence; identical to SEQ ID NO: 10
  Description of Artificial Sequence: Synthetic polypeptide

SEQ ID NO: 1113 - protein, 124 aa, Artificial Sequence
  Description of Artificial Sequence: Synthetic polypeptide
EVQLLESGGGLVQPGGSLRLSCAASGFTFSTYPMFWVRQAPGKGLEWVSYISPSGGYTDYADSVKGRFTISRDNSKNTLYLQMNSLRAEDTAVYYCAKDRAYGDYVGWNGFDYWGQGTLVTVSS

SEQ ID NO: 1114 - protein, 108 aa, Artificial Sequence; identical to SEQ ID NO: 10
  Description of Artificial Sequence: Synthetic polypeptide

SEQ ID NO: 1115 - protein, 124 aa, Artificial Sequence
  Description of Artificial Sequence: Synthetic polypeptide
EVQLLESGGGLVQPGGSLRLSCAASGFTFSTYPMIWVRQAPGKGLEWVSYIVPSGGYTGYADSVKGRFTISRDNSKNTLYLQMNSLRAEDTAVYYCAKDRAYGDYVGWNGFDYWGQGTLVTVSS

SEQ ID NO: 1116 - protein, 108 aa, Artificial Sequence; identical to SEQ ID NO: 10
  Description of Artificial Sequence: Synthetic polypeptide

SEQ ID NO: 1117 - protein, 124 aa, Artificial Sequence
  Description of Artificial Sequence: Synthetic polypeptide
EVQLLESGGGLVQPGGSLRLSCAASGFTFSTYPMMWVRQAPGKGLEWVSYIYPSGGATFYADSVKGRFTISRDNSKNTLYLQMNSLRAEDTAVYYCAKDRAYGDYVGWNGFDYWGQGTLVTVSS

SEQ ID NO: 1118 - protein, 108 aa, Artificial Sequence; identical to SEQ ID NO: 10
  Description of Artificial Sequence: Synthetic polypeptide

SEQ ID NO: 1119 - protein, 124 aa, Artificial Sequence
  Description of Artificial Sequence: Synthetic polypeptide
EVQLLESGGGLVQPGGSLRLSCAASGFTFSTYPMWWVRQAPGKGLEWVSSISPSGGATYYADSVKGRFTISRDNSKNTLYLQMNSLRAEDTAVYYCAKDRAYGDYVGWNGFDYWGQGTLVTVSS

SEQ ID NO: 1120 - protein, 108 aa, Artificial Sequence; identical to SEQ ID NO: 10
  Description of Artificial Sequence: Synthetic polypeptide

SEQ ID NO: 1121 - protein, 124 aa, Artificial Sequence
  Description of Artificial Sequence: Synthetic polypeptide
EVQLLESGGGLVQPGGSLRLSCAASGFTFSTYPMWWVRQAPGKGLEWVSSIVPSGGATYYADSVKGRFTISRDNSKNTLYLQMNSLRAEDTAVYYCAKDRAYGDYVGWNGFDYWGQGTLVTVSS

SEQ ID NO: 1122 - protein, 108 aa, Artificial Sequence; identical to SEQ ID NO: 10
  Description of Artificial Sequence: Synthetic polypeptide

SEQ ID NO: 1123 - protein, 124 aa, Artificial Sequence
  Description of Artificial Sequence: Synthetic polypeptide
EVQLLESGGGLVQPGGSLRLSCAASGFTFSTYPMWWVRQAPGKGLEWVSVIYSSGGYTGYADSVKGRFTISRDNSKNTLYLQMNSLRAEDTAVYYCAKDRAYGDYVGWNGFDYWGQGTLVTVSS

SEQ ID NO: 1124 - protein, 108 aa, Artificial Sequence; identical to SEQ ID NO: 10
  Description of Artificial Sequence: Synthetic polypeptide

SEQ ID NO: 1125 - protein, 124 aa, Artificial Sequence
  Description of Artificial Sequence: Synthetic polypeptide
EVQLLESGGGLVQPGGSLRLSCAASGFTFSTYPMWWVRQAPGKGLEWVSYISPSGGATFYADSVKGRFTISRDNSKNTLYLQMNSLRAEDTAVYYCAKDRAYGDYVGWNGFDYWGQGTLVTVSS

SEQ ID NO: 1126 - protein, 108 aa, Artificial Sequence; identical to SEQ ID NO: 10
  Description of Artificial Sequence: Synthetic polypeptide

SEQ ID NO: 1127 - protein, 124 aa, Artificial Sequence
  Description of Artificial Sequence: Synthetic polypeptide
EVQLLESGGGLVQPGGSLRLSCAASGFTFSTYPMWWVRQAPGKGLEWVSYISPSGGGTFYADSVKGRFTISRDNSKNTLYLQMNSLRAEDTAVYYCAKDRAYGDYVGWNGFDYWGQGTLVTVSS

SEQ ID NO: 1128 - protein, 108 aa, Artificial Sequence; identical to SEQ ID NO: 10
  Description of Artificial Sequence: Synthetic polypeptide

SEQ ID NO: 1129 - protein, 124 aa, Artificial Sequence
  Description of Artificial Sequence: Synthetic polypeptide
EVQLLESGGGLVQPGGSLRLSCAASGFTFSTYPMWWVRQAPGKGLEWVSYIVPSGGYTDYADSVKGRFTISRDNSKNTLYLQMNSLRAEDTAVYYCAKDRAYGDYVGWNGFDYWGQGTLVTVSS

SEQ ID NO: 1130 - protein, 108 aa, Artificial Sequence; identical to SEQ ID NO: 10
  Description of Artificial Sequence: Synthetic polypeptide

SEQ ID NO: 1131 - protein, 124 aa, Artificial Sequence
  Description of Artificial Sequence: Synthetic polypeptide
EVQLLESGGGLVQPGGSLRLSCAASGFTFSTYPMWWVRQAPGKGLEWVSYIYPSGGGTFYADSVKGRFTISRDNSKNTLYLQMNSLRAEDTAVYYCAKDRAYGDYVGWNGFDYWGQGTLVTVSS

SEQ ID NO: 1132 - protein, 108 aa, Artificial Sequence; identical to SEQ ID NO: 10
  Description of Artificial Sequence: Synthetic polypeptide

SEQ ID NO: 1133 - protein, 123 aa, Artificial Sequence
  Description of Artificial Sequence: Synthetic polypeptide
EVQLLESGGGLVQPGGSLRLSCAASGFTFSTYQMWWVRQAPGKGLEWVSSIYSSGGTFYADSVKGRFTISRDNSKNTLYLQMNSLRAEDTAVYYCAKDRAYGDYVGWNGFDYWGQGTLVTVSS

SEQ ID NO: 1134 - protein, 108 aa, Artificial Sequence; identical to SEQ ID NO: 10
  Description of Artificial Sequence: Synthetic polypeptide

SEQ ID NO: 1135 - protein, 124 aa, Artificial Sequence
  Description of Artificial Sequence: Synthetic polypeptide
EVQLLESGGGLVQPGGSLRLSCAASGFTFSTYSMIWVRQAPGKGLEWVSYISPSGGFTDYADSVKGRFTISRDNSKNTLYLQMNSLRAEDTAVYYCAKDRAYGDYVGWNGFDYWGQGTLVTVSS

SEQ ID NO: 1136 - protein, 108 aa, Artificial Sequence; identical to SEQ ID NO: 10
  Description of Artificial Sequence: Synthetic polypeptide

SEQ ID NO: 1137 - protein, 124 aa, Artificial Sequence
  Description of Artificial Sequence: Synthetic polypeptide
EVQLLESGGGLVQPGGSLRLSCAASGFTFSVYDMIWVRQAPGKGLEWVSYIGPSGGMTLYADSVKGRFTISRDNSKNTLYLQMNSLRAEDTAVYYCAKDRAYGDYVGWNGFDYWGQGTLVTVSS

SEQ ID NO: 1138 - protein, 108 aa, Artificial Sequence; identical to SEQ ID NO: 10
  Description of Artificial Sequence: Synthetic polypeptide

SEQ ID NO: 1139 - protein, 124 aa, Artificial Sequence
  Description of Artificial Sequence: Synthetic polypeptide
EVQLLESGGGLVQPGGSLRLSCAASGFTFSVYDMWWVRQAPGKGLEWVSVIYPSGGATYYADSVKGRFTISRDNSKNTLYLQMNSLRAEDTAVYYCAKDRAYGDYVGWNGFDYWGQGTLVTVSS

SEQ ID NO: 1140 - protein, 108 aa, Artificial Sequence; identical to SEQ ID NO: 10
  Description of Artificial Sequence: Synthetic polypeptide

SEQ ID NO: 1141 - protein, 124 aa, Artificial Sequence
  Description of Artificial Sequence: Synthetic polypeptide
EVQLLESGGGLVQPGGSLRLSCAASGFTFSVYDMWWVRQAPGKGLEWVSVIYPSGGYTDYADSVKGRFTISRDNSKNTLYLQMNSLRAEDTAVYYCAKDRAYGDYVGWNGFDYWGQGTLVTVSS

SEQ ID NO: 1142 - protein, 108 aa, Artificial Sequence; identical to SEQ ID NO: 10
  Description of Artificial Sequence: Synthetic polypeptide

SEQ ID NO: 1143 - protein, 124 aa, Artificial Sequence
  Description of Artificial Sequence: Synthetic polypeptide
EVQLLESGGGLVQPGGSLRLSCAASGFTFSVYDMWWVRQAPGKGLEWVSVIYSSGGATFYADSVKGRFTISRDNSKNTLYLQMNSLRAEDTAVYYCAKDRAYGDYVGWNGFDYWGQGTLVTVSS

SEQ ID NO: 1144 - protein, 108 aa, Artificial Sequence; identical to SEQ ID NO: 10
  Description of Artificial Sequence: Synthetic polypeptide

SEQ ID NO: 1145 - protein, 124 aa, Artificial Sequence
  Description of Artificial Sequence: Synthetic polypeptide
EVQLLESGGGLVQPGGSLRLSCAASGFTFSVYDMWWVRQAPGKGLEWVSVIYSSGGPTFYADSVKGRFTISRDNSKNTLYLQMNSLRAEDTAVYYCAKDRAYGDYVGWNGFDYWGQGTLVTVSS

SEQ ID NO: 1146 - protein, 108 aa, Artificial Sequence; identical to SEQ ID NO: 10
  Description of Artificial Sequence: Synthetic polypeptide

SEQ ID NO: 1147 - protein, 124 aa, Artificial Sequence
  Description of Artificial Sequence: Synthetic polypeptide
EVQLLESGGGLVQPGGSLRLSCAASGFTFSVYDMWWVRQAPGKGLEWVSYISPSGGFTDYADSVKGRFTISRDNSKNTLYLQMNSLRAEDTAVYYCAKDRAYGDYVGWNGFDYWGQGTLVTVSS

SEQ ID NO: 1148 - protein, 108 aa, Artificial Sequence; identical to SEQ ID NO: 10
  Description of Artificial Sequence: Synthetic polypeptide

SEQ ID NO: 1149 - protein, 124 aa, Artificial Sequence
  Description of Artificial Sequence: Synthetic polypeptide
EVQLLESGGGLVQPGGSLRLSCAASGFTFSVYEMWWVRQAPGKGLEWVSYISPSGGGTFYADSVKGRFTISRDNSKNTLYLQMNSLRAEDTAVYYCAKDRAYGDYVGWNGFDYWGQGTLVTVSS

SEQ ID NO: 1150 - protein, 108 aa, Artificial Sequence; identical to SEQ ID NO: 10
  Description of Artificial Sequence: Synthetic polypeptide

SEQ ID NO: 1151 - protein, 124 aa, Artificial Sequence
  Description of Artificial Sequence: Synthetic polypeptide
EVQLLESGGGLVQPGGSLRLSCAASGFTFSVYNMWWVRQAPGKGLEWVSSISPSGGGTFYADSVKGRFTISRDNSKNTLYLQMNSLRAEDTAVYYCAKDRAYGDYVGWNGFDYWGQGTLVTVSS

SEQ ID NO: 1152 - protein, 108 aa, Artificial Sequence; identical to SEQ ID NO: 10
  Description of Artificial Sequence: Synthetic polypeptide

SEQ ID NO: 1153 - protein, 124 aa, Artificial Sequence
  Description of Artificial Sequence: Synthetic polypeptide
EVQLLESGGGLVQPGGSLRLSCAASGFTFSVYPMWWVRQAPGKGLEWVSSISPSGGATYYADSVKGRFTISRDNSKNTLYLQMNSLRAEDTAVYYCAKDRAYGDYVGWNGFDYWGQGTLVTVSS

SEQ ID NO: 1154 - protein, 108 aa, Artificial Sequence; identical to SEQ ID NO: 10
  Description of Artificial Sequence: Synthetic polypeptide

SEQ ID NO: 1155 - protein, 124 aa, Artificial Sequence
  Description of Artificial Sequence: Synthetic polypeptide
EVQLLESGGGLVQPGGSLRLSCAASGFTFSVYPMWWVRQAPGKGLEWVSSISPSGGYTGYADSVKGRFTISRDNSKNTLYLQMNSLRAEDTAVYYCAKDRAYGDYVGWNGFDYWGQGTLVTVSS

SEQ ID NO: 1156 - protein, 108 aa, Artificial Sequence; identical to SEQ ID NO: 10
  Description of Artificial Sequence: Synthetic polypeptide

SEQ ID NO: 1157 - protein, 123 aa, Artificial Sequence
  Description of Artificial Sequence: Synthetic polypeptide
EVQLLESGGGLVQPGGSLRLSCAASGFTFSVYPMWWVRQAPGKGLEWVSSISSGGATYYADSVKGRFTISRDNSKNTLYLQMNSLRAEDTAVYYCAKDRAYGDYVGWNGFDYWGQGTLVTVSS

SEQ ID NO: 1158 - protein, 108 aa, Artificial Sequence; identical to SEQ ID NO: 10
  Description of Artificial Sequence: Synthetic polypeptide

SEQ ID NO: 1159 - protein, 124 aa, Artificial Sequence
  Description of Artificial Sequence: Synthetic polypeptide
EVQLLESGGGLVQPGGSLRLSCAASGFTFSVYPMWWVRQAPGKGLEWVSWISPSGGGTFYADSVKGRFTISRDNSKNTLYLQMNSLRAEDTAVYYCAKDRAYGDYVGWNGFDYWGQGTLVTVSS

SEQ ID NO: 1160 - protein, 108 aa, Artificial Sequence; identical to SEQ ID NO: 10
  Description of Artificial Sequence: Synthetic polypeptide

SEQ ID NO: 1161 - protein, 124 aa, Artificial Sequence
  Description of Artificial Sequence: Synthetic polypeptide
EVQLLESGGGLVQPGGSLRLSCAASGFTFSVYPMWWVRQAPGKGLEWVSWISSSGGGTAYADSVKGRFTISRDNSKNTLYLQMNSLRAEDTAVYYCAKDRAYGDYVGWNGFDYWGQGTLVTVSS

SEQ ID NO: 1162 - protein, 108 aa, Artificial Sequence; identical to SEQ ID NO: 10
  Description of Artificial Sequence: Synthetic polypeptide

SEQ ID NO: 1163 - protein, 124 aa, Artificial Sequence
  Description of Artificial Sequence: Synthetic polypeptide
EVQLLESGGGLVQPGGSLRLSCAASGFTFSVYPMWWVRQAPGKGLEWVSYIVPSGGATYYADSVKGRFTISRDNSKNTLYLQMNSLRAEDTAVYYCAKDRAYGDYVGWNGFDYWGQGTLVTVSS

SEQ ID NO: 1164 - protein, 108 aa, Artificial Sequence; identical to SEQ ID NO: 10
  Description of Artificial Sequence: Synthetic polypeptide

SEQ ID NO: 1165 - protein, 124 aa, Artificial Sequence
  Description of Artificial Sequence: Synthetic polypeptide
EVQLLESGGGLVQPGGSLRLSCAASGFTFSVYPMWWVRQAPGKGLEWVSYIYPSGGATYYADSVKGRFTISRDNSKNTLYLQMNSLRAEDTAVYYCAKDRAYGDYVGWNGFDYWGQGTLVTVSS

SEQ ID NO: 1166 - protein, 108 aa, Artificial Sequence; identical to SEQ ID NO: 10
  Description of Artificial Sequence: Synthetic polypeptide

SEQ ID NO: 1167 - protein, 124 aa, Artificial Sequence
  Description of Artificial Sequence: Synthetic polypeptide
EVQLLESGGGLVQPGGSLRLSCAASGFTFSVYQMWWVRQAPGKGLEWVSVIYPSGGTTFYADSVKGRFTISRDNSKNTLYLQMNSLRAEDTAVYYCAKDRAYGDYVGWNGFDYWGQGTLVTVSS

SEQ ID NO: 1168 - protein, 108 aa, Artificial Sequence; identical to SEQ ID NO: 10
  Description of Artificial Sequence: Synthetic polypeptide

SEQ ID NO: 1169 - protein, 124 aa, Artificial Sequence
  Description of Artificial Sequence: Synthetic polypeptide
EVQLLESGGGLVQPGGSLRLSCAASGFTFSVYWMIWVRQAPGKGLEWVSYISPSGGGTFYADSVKGRFTISRDNSKNTLYLQMNSLRAEDTAVYYCAKDRAYGDYVGWNGFDYWGQGTLVTVSS

SEQ ID NO: 1170 - protein, 108 aa, Artificial Sequence; identical to SEQ ID NO: 10
  Description of Artificial Sequence: Synthetic polypeptide

SEQ ID NO: 1171 - protein, 124 aa, Artificial Sequence
  Description of Artificial Sequence: Synthetic polypeptide
EVQLLESGGGLVQPGGSLRLSCAASGFTFSWYAMWWVRQAPGKGLEWVSSISPSGGGTYYADSVKGRFTISRDNSKNTLYLQMNSLRAEDTAVYYCAKDRAYGDYVGWNGFDYWGQGTLVTVSS

SEQ ID NO: 1172 - protein, 108 aa, Artificial Sequence; identical to SEQ ID NO: 10
  Description of Artificial Sequence: Synthetic polypeptide

SEQ ID NO: 1173 - protein, 124 aa, Artificial Sequence
  Description of Artificial Sequence: Synthetic polypeptide
EVQLLESGGGLVQPGGSLRLSCAASGFTFSWYDMFWVRQAPGKGLEWVSSISPSGGATFYADSVKGRFTISRDNSKNTLYLQMNSLRAEDTAVYYCAKDRAYGDYVGWNGFDYWGQGTLVTVSS

SEQ ID NO: 1174 - protein, 108 aa, Artificial Sequence; identical to SEQ ID NO: 10
  Description of Artificial Sequence: Synthetic polypeptide

SEQ ID NO: 1175 - protein, 124 aa, Artificial Sequence
  Description of Artificial Sequence: Synthetic polypeptide
EVQLLESGGGLVQPGGSLRLSCAASGFTFSWYDMWWVRQAPGKGLEWVSVIYPSGGATYYADSVKGRFTISRDNSKNTLYLQMNSLRAEDTAVYYCAKDRAYGDYVGWNGFDYWGQGTLVTVSS

SEQ ID NO: 1176 - protein, 108 aa, Artificial Sequence; identical to SEQ ID NO: 10
  Description of Artificial Sequence: Synthetic polypeptide

SEQ ID NO: 1177 - protein, 124 aa, Artificial Sequence
  Description of Artificial Sequence: Synthetic polypeptide
EVQLLESGGGLVQPGGSLRLSCAASGFTFSWYDMWWVRQAPGKGLEWVSVIYPSGGFTDYADSVKGRFTISRDNSKNTLYLQMNSLRAEDTAVYYCAKDRAYGDYVGWNGFDYWGQGTLVTVSS

SEQ ID NO: 1178 - protein, 108 aa, Artificial Sequence; identical to SEQ ID NO: 10
  Description of Artificial Sequence: Synthetic polypeptide

SEQ ID NO: 1179 - protein, 124 aa, Artificial Sequence
  Description of Artificial Sequence: Synthetic polypeptide
EVQLLESGGGLVQPGGSLRLSCAASGFTFSWYDMWWVRQAPGKGLEWVSVIYPSGGYTGYADSVKGRFTISRDNSKNTLYLQMNSLRAEDTAVYYCAKDRAYGDYVGWNGFDYWGQGTLVTVSS

SEQ ID NO: 1180 - protein, 108 aa, Artificial Sequence; identical to SEQ ID NO: 10
  Description of Artificial Sequence: Synthetic polypeptide

SEQ ID NO: 1181 - protein, 124 aa, Artificial Sequence
  Description of Artificial Sequence: Synthetic polypeptide
EVQLLESGGGLVQPGGSLRLSCAASGFTFSWYDMWWVRQAPGKGLEWVSVIYSSGGATFYADSVKGRFTISRDNSKNTLYLQMNSLRAEDTAVYYCAKDRAYGDYVGWNGFDYWGQGTLVTVSS

SEQ ID NO: 1182 - protein, 108 aa, Artificial Sequence; identical to SEQ ID NO: 10
  Description of Artificial Sequence: Synthetic polypeptide

SEQ ID NO: 1183 - protein, 124 aa, Artificial Sequence
  Description of Artificial Sequence: Synthetic polypeptide
EVQLLESGGGLVQPGGSLRLSCAASGFTFSWYDMWWVRQAPGKGLEWVSVIYSSGGPTFYADSVKGRFTISRDNSKNTLYLQMNSLRAEDTAVYYCAKDRAYGDYVGWNGFDYWGQGTLVTVSS

SEQ ID NO: 1184 - protein, 108 aa, Artificial Sequence; identical to SEQ ID NO: 10
  Description of Artificial Sequence: Synthetic polypeptide

SEQ ID NO: 1185 - protein, 124 aa, Artificial Sequence
  Description of Artificial Sequence: Synthetic polypeptide
EVQLLESGGGLVQPGGSLRLSCAASGFTFSWYEMWWVRQAPGKGLEWVSWISPSGGGTQYADSVKGRFTISRDNSKNTLYLQMNSLRAEDTAVYYCAKDRAYGDYVGWNGFDYWGQGTLVTVSS

SEQ ID NO: 1186 - protein, 108 aa, Artificial Sequence; identical to SEQ ID NO: 10
  Description of Artificial Sequence: Synthetic polypeptide

SEQ ID NO: 1187 - protein, 124 aa, Artificial Sequence
  Description of Artificial Sequence: Synthetic polypeptide
EVQLLESGGGLVQPGGSLRLSCAASGFTFSWYEMWWVRQAPGKGLEWVSYISPSGGGTYYADSVKGRFTISRDNSKNTLYLQMNSLRAEDTAVYYCAKDRAYGDYVGWNGFDYWGQGTLVTVSS

SEQ ID NO: 1188 - protein, 108 aa, Artificial Sequence; identical to SEQ ID NO: 10
  Description of Artificial Sequence: Synthetic polypeptide

SEQ ID NO: 1189 - protein, 124 aa, Artificial Sequence
  Description of Artificial Sequence: Synthetic polypeptide
EVQLLESGGGLVQPGGSLRLSCAASGFTFSWYNMWWVRQAPGKGLEWVSVIYPSGGGTFYADSVKGRFTISRDNSKNTLYLQMNSLRAEDTAVYYCAKDRAYGDYVGWNGFDYWGQGTLVTVSS

SEQ ID NO: 1190 - protein, 108 aa, Artificial Sequence; identical to SEQ ID NO: 10
  Description of Artificial Sequence: Synthetic polypeptide

SEQ ID NO: 1191 - protein, 124 aa, Artificial Sequence
  Description of Artificial Sequence: Synthetic polypeptide
EVQLLESGGGLVQPGGSLRLSCAASGFTFSWYNMWWVRQAPGKGLEWVSYIVSSGGFTDYADSVKGRFTISRDNSKNTLYLQMNSLRAEDTAVYYCAKDRAYGDYVGWNGFDYWGQGTLVTVSS

SEQ ID NO: 1192 - protein, 108 aa, Artificial Sequence; identical to SEQ ID NO: 10
  Description of Artificial Sequence: Synthetic polypeptide

SEQ ID NO: 1193 - protein, 124 aa, Artificial Sequence
  Description of Artificial Sequence: Synthetic polypeptide
EVQLLESGGGLVQPGGSLRLSCAASGFTFSWYPMIWVRQAPGKGLEWVSYISSSGGYTSYADSVKGRFTISRDNSKNTLYLQMNSLRAEDTAVYYCAKDRAYGDYVGWNGFDYWGQGTLVTVSS

SEQ ID NO: 1194 - protein, 108 aa, Artificial Sequence; identical to SEQ ID NO: 10
  Description of Artificial Sequence: Synthetic polypeptide

SEQ ID NO: 1195 - protein, 124 aa, Artificial Sequence
  Description of Artificial Sequence: Synthetic polypeptide
EVQLLESGGGLVQPGGSLRLSCAASGFTFSWYPMTWVRQAPGKGLEWVSYISPSGGYTGYADSVKGRFTISRDNSKNTLYLQMNSLRAEDTAVYYCAKDRAYGDYVGWNGFDYWGQGTLVTVSS

SEQ ID NO: 1196 - protein, 108 aa, Artificial Sequence; identical to SEQ ID NO: 10
  Description of Artificial Sequence: Synthetic polypeptide

SEQ ID NO: 1197 - protein, 124 aa, Artificial Sequence
  Description of Artificial Sequence: Synthetic polypeptide
EVQLLESGGGLVQPGGSLRLSCAASGFTFSWYPMVWVRQAPGKGLEWVSYIYPSGGGTFYADSVKGRFTISRDNSKNTLYLQMNSLRAEDTAVYYCAKDRAYGDYVGWNGFDYWGQGTLVTVSS

SEQ ID NO: 1198 - protein, 108 aa, Artificial Sequence; identical to SEQ ID NO: 10
  Description of Artificial Sequence: Synthetic polypeptide

SEQ ID NO: 1199 - protein, 124 aa, Artificial Sequence
  Description of Artificial Sequence: Synthetic polypeptide
EVQLLESGGGLVQPGGSLRLSCAASGFTFSWYPMWWVRQAPGKGLEWVSSISPSGGATYYADSVKGRFTISRDNSKNTLYLQMNSLRAEDTAVYYCAKDRAYGDYVGWNGFDYWGQGTLVTVSS

SEQ ID NO: 1200 - protein, 108 aa, Artificial Sequence; identical to SEQ ID NO: 10
  Description of Artificial Sequence: Synthetic polypeptide

SEQ ID NO: 1201 - protein, 124 aa, Artificial Sequence
  Description of Artificial Sequence: Synthetic polypeptide
EVQLLESGGGLVQPGGSLRLSCAASGFTFSWYPMWWVRQAPGKGLEWVSSIVPSGGATYYADSVKGRFTISRDNSKNTLYLQMNSLRAEDTAVYYCAKDRAYGDYVGWNGFDYWGQGTLVTVSS

SEQ ID NO: 1202 - protein, 108 aa, Artificial Sequence; identical to SEQ ID NO: 10
  Description of Artificial Sequence: Synthetic polypeptide

SEQ ID NO: 1203 - protein, 124 aa, Artificial Sequence
  Description of Artificial Sequence: Synthetic polypeptide
EVQLLESGGGLVQPGGSLRLSCAASGFTFSWYPMWWVRQAPGKGLEWVSVIYPSGGYTSYADSVKGRFTISRDNSKNTLYLQMNSLRAEDTAVYYCAKDRAYGDYVGWNGFDYWGQGTLVTVSS

SEQ ID NO: 1204 - protein, 108 aa, Artificial Sequence; identical to SEQ ID NO: 10
  Description of Artificial Sequence: Synthetic polypeptide

SEQ ID NO: 1205 - protein, 124 aa, Artificial Sequence
  Description of Artificial Sequence: Synthetic polypeptide
EVQLLESGGGLVQPGGSLRLSCAASGFTFSWYPMWWVRQAPGKGLEWVSVIYSSGGATFYADSVKGRFTISRDNSKNTLYLQMNSLRAEDTAVYYCAKDRAYGDYVGWNGFDYWGQGTLVTVSS

SEQ ID NO: 1206 - protein, 108 aa, Artificial Sequence; identical to SEQ ID NO: 10
  Description of Artificial Sequence: Synthetic polypeptide

SEQ ID NO: 1207 - protein, 124 aa, Artificial Sequence
  Description of Artificial Sequence: Synthetic polypeptide
EVQLLESGGGLVQPGGSLRLSCAASGFTFSWYPMWWVRQAPGKGLEWVSVIYSSGGYTGYADSVKGRFTISRDNSKNTLYLQMNSLRAEDTAVYYCAKDRAYGDYVGWNGFDYWGQGTLVTVSS

SEQ ID NO: 1208 - protein, 108 aa, Artificial Sequence; identical to SEQ ID NO: 10
  Description of Artificial Sequence: Synthetic polypeptide

SEQ ID NO: 1209 - protein, 124 aa, Artificial Sequence
  Description of Artificial Sequence: Synthetic polypeptide
EVQLLESGGGLVQPGGSLRLSCAASGFTFSWYPMWWVRQAPGKGLEWVSYIVPSGGATFYADSVKGRFTISRDNSKNTLYLQMNSLRAEDTAVYYCAKDRAYGDYVGWNGFDYWGQGTLVTVSS

SEQ ID NO: 1210 - protein, 108 aa, Artificial Sequence; identical to SEQ ID NO: 10
  Description of Artificial Sequence: Synthetic polypeptide

SEQ ID NO: 1211 - protein, 124 aa, Artificial Sequence
  Description of Artificial Sequence: Synthetic polypeptide
EVQLLESGGGLVQPGGSLRLSCAASGFTFSWYPMWWVRQAPGKGLEWVSYIVPSGGRTYYADSVKGRFTISRDNSKNTLYLQMNSLRAEDTAVYYCAKDRAYGDYVGWNGFDYWGQGTLVTVSS

SEQ ID NO: 1212 - protein, 108 aa, Artificial Sequence; identical to SEQ ID NO: 10
  Description of Artificial Sequence: Synthetic polypeptide

SEQ ID NO: 1213 - protein, 124 aa, Artificial Sequence
  Description of Artificial Sequence: Synthetic polypeptide
EVQLLESGGGLVQPGGSLRLSCAASGFTFSWYSMWWVRQAPGKGLEWVSVIYPSGGGTFYADSVKGRFTISRDNSKNTLYLQMNSLRAEDTAVYYCAKDRAYGDYVGWNGFDYWGQGTLVTVSS

SEQ ID NO: 1214 - protein, 108 aa, Artificial Sequence; identical to SEQ ID NO: 10
  Description of Artificial Sequence: Synthetic polypeptide

SEQ ID NO: 1215 - protein, 124 aa, Artificial Sequence
  Description of Artificial Sequence: Synthetic polypeptide
EVQLLESGGGLVQPGGSLRLSCAASGFTFSWYTMWWVRQAPGKGLEWVSSISPSGGGTYYADSVKGRFTISRDNSKNTLYLQMNSLRAEDTAVYYCAKDRAYGDYVGWNGFDYWGQGTLVTVSS

SEQ ID NO: 1216 - protein, 108 aa, Artificial Sequence; identical to SEQ ID NO: 10
  Description of Artificial Sequence: Synthetic polypeptide

SEQ ID NO: 1217 - protein, 124 aa, Artificial Sequence
  Description of Artificial Sequence: Synthetic polypeptide
EVQLLESGGGLVQPGGSLRLSCAASGFTFSWYYMIWVRQAPGKGLEWVSYISPSGGGTYYADSVKGRFTISRDNSKNTLYLQMNSLRAEDTAVYYCAKDRAYGDYVGWNGFDYWGQGTLVTVSS

SEQ ID NO: 1218 - protein, 108 aa, Artificial Sequence; identical to SEQ ID NO: 10
  Description of Artificial Sequence: Synthetic polypeptide

SEQ ID NO: 1219 - protein, 124 aa, Artificial Sequence
  Description of Artificial Sequence: Synthetic polypeptide
EVQLLESGGGLVQPGGSLRLSCAASGFTFSYYDMIWVRQAPGKGLEWVSWISPSGGLTMYADSVKGRFTISRDNSKNTLYLQMNSLRAEDTAVYYCAKDRAYGDYVGWNGFDYWGQGTLVTVSS

SEQ ID NO: 1220 - protein, 108 aa, Artificial Sequence; identical to SEQ ID NO: 10
  Description of Artificial Sequence: Synthetic polypeptide

SEQ ID NO: 1221 - protein, 124 aa, Artificial Sequence
  Description of Artificial Sequence: Synthetic polypeptide
EVQLLESGGGLVQPGGSLRLSCAASGFTFSYYDMIWVRQAPGKGLEWVSYIVPSGGYTSYADSVKGRFTISRDNSKNTLYLQMNSLRAEDTAVYYCAKDRAYGDYVGWNGFDYWGQGTLVTVSS

SEQ ID NO: 1222 - protein, 108 aa, Artificial Sequence; identical to SEQ ID NO: 10
  Description of Artificial Sequence: Synthetic polypeptide

SEQ ID NO: 1223 - protein, 124 aa, Artificial Sequence
  Description of Artificial Sequence: Synthetic polypeptide
EVQLLESGGGLVQPGGSLRLSCAASGFTFSYYDMVWVRQAPGKGLEWVSYISPSGGFTLYADSVKGRFTISRDNSKNTLYLQMNSLRAEDTAVYYCAKDRAYGDYVGWNGFDYWGQGTLVTVSS

SEQ ID NO: 1224 - protein, 108 aa, Artificial Sequence; identical to SEQ ID NO: 10
  Description of Artificial Sequence: Synthetic polypeptide

SEQ ID NO: 1225 - protein, 124 aa, Artificial Sequence
  Description of Artificial Sequence: Synthetic polypeptide
EVQLLESGGGLVQPGGSLRLSCAASGFTFSYYDMWWVRQAPGKGLEWVSSISPSGGFTGYADSVKGRFTISRDNSKNTLYLQMNSLRAEDTAVYYCAKDRAYGDYVGWNGFDYWGQGTLVTVSS

SEQ ID NO: 1226 - protein, 108 aa, Artificial Sequence; identical to SEQ ID NO: 10
  Description of Artificial Sequence: Synthetic polypeptide

SEQ ID NO: 1227 - protein, 124 aa, Artificial Sequence
  Description of Artificial Sequence: Synthetic polypeptide
EVQLLESGGGLVQPGGSLRLSCAASGFTFSYYDMWWVRQAPGKGLEWVSVISSSGGGTFYADSVKGRFTISRDNSKNTLYLQMNSLRAEDTAVYYCAKDRAYGDYVGWNGFDYWGQGTLVTVSS

SEQ ID NO: 1228 - protein, 108 aa, Artificial Sequence; identical to SEQ ID NO: 10
  Description of Artificial Sequence: Synthetic polypeptide

SEQ ID NO: 1229 - protein, 124 aa, Artificial Sequence
  Description of Artificial Sequence: Synthetic polypeptide
EVQLLESGGGLVQPGGSLRLSCAASGFTFSYYDMWWVRQAPGKGLEWVSVIYPSGGTTFYADSVKGRFTISRDNSKNTLYLQMNSLRAEDTAVYYCAKDRAYGDYVGWNGFDYWGQGTLVTVSS

SEQ ID NO: 1230 - protein, 108 aa, Artificial Sequence; identical to SEQ ID NO: 10
  Description of Artificial Sequence: Synthetic polypeptide

SEQ ID NO: 1231 - protein, 124 aa, Artificial Sequence
  Description of Artificial Sequence: Synthetic polypeptide
EVQLLESGGGLVQPGGSLRLSCAASGFTFSYYDMWWVRQAPGKGLEWVSVIYPSGGYTAYADSVKGRFTISRDNSKNTLYLQMNSLRAEDTAVYYCAKDRAYGDYVGWNGFDYWGQGTLVTVSS

SEQ ID NO: 1232 - protein, 108 aa, Artificial Sequence; identical to SEQ ID NO: 10
  Description of Artificial Sequence: Synthetic polypeptide

SEQ ID NO: 1233 - protein, 124 aa, Artificial Sequence
  Description of Artificial Sequence: Synthetic polypeptide
EVQLLESGGGLVQPGGSLRLSCAASGFTFSYYDMWWVRQAPGKGLEWVSYISSSGGGTYYADSVKGRFTISRDNSKNTLYLQMNSLRAEDTAVYYCAKDRAYGDYVGWNGFDYWGQGTLVTVSS

SEQ ID NO: 1234 - protein, 108 aa, Artificial Sequence; identical to SEQ ID NO: 10
  Description of Artificial Sequence: Synthetic polypeptide

SEQ ID NO: 1235 - protein, 124 aa, Artificial Sequence
  Description of Artificial Sequence: Synthetic polypeptide
EVQLLESGGGLVQPGGSLRLSCAASGFTFSYYEMWWVRQAPGKGLEWVSYISSSGGFTSYADSVKGRFTISRDNSKNTLYLQMNSLRAEDTAVYYCAKDRAYGDYVGWNGFDYWGQGTLVTVSS

SEQ ID NO: 1236 - protein, 108 aa, Artificial Sequence; identical to SEQ ID NO: 10
  Description of Artificial Sequence: Synthetic polypeptide

SEQ ID NO: 1237 - protein, 124 aa, Artificial Sequence
  Description of Artificial Sequence: Synthetic polypeptide
EVQLLESGGGLVQPGGSLRLSCAASGFTFSYYGMWWVRQAPGKGLEWVSVISPSGGGTFYADSVKGRFTISRDNSKNTLYLQMNSLRAEDTAVYYCAKDRAYGDYVGWNGFDYWGQGTLVTVSS

SEQ ID NO: 1238 - protein, 108 aa, Artificial Sequence; identical to SEQ ID NO: 10
  Description of Artificial Sequence: Synthetic polypeptide

SEQ ID NO: 1239 - protein, 124 aa, Artificial Sequence
  Description of Artificial Sequence: Synthetic polypeptide
EVQLLESGGGLVQPGGSLRLSCAASGFTFSYYMMIWVRQAPGKGLEWVSGIVSSGGFTMYADSVKGRFTISRDNSKNTLYLQMNSLRAEDTAVYYCAKDRAYGDYVGWNGFDYWGQGTLVTVSS

SEQ ID NO: 1240 - protein, 108 aa, Artificial Sequence; identical to SEQ ID NO: 10
  Description of Artificial Sequence: Synthetic polypeptide

SEQ ID NO: 1241 - protein, 124 aa, Artificial Sequence
  Description of Artificial Sequence: Synthetic polypeptide
EVQLLESGGGLVQPGGSLRLSCAASGFTFSYYMMWWVRQAPGKGLEWVSSISSSGGGTFYADSVKGRFTISRDNSKNTLYLQMNSLRAEDTAVYYCAKDRAYGDYVGWNGFDYWGQGTLVTVSS

SEQ ID NO: 1242 - protein, 108 aa, Artificial Sequence; identical to SEQ ID NO: 10
  Description of Artificial Sequence: Synthetic polypeptide

SEQ ID NO: 1243 - protein, 124 aa, Artificial Sequence
  Description of Artificial Sequence: Synthetic polypeptide
EVQLLESGGGLVQPGGSLRLSCAASGFTFSYYMMWWVRQAPGKGLEWVSSIYSSGGATFYADSVKGRFTISRDNSKNTLYLQMNSLRAEDTAVYYCAKDRAYGDYVGWNGFDYWGQGTLVTVSS

SEQ ID NO: 1244 - protein, 108 aa, Artificial Sequence; identical to SEQ ID NO: 10
  Description of Artificial Sequence: Synthetic polypeptide

SEQ ID NO: 1245 - protein, 124 aa, Artificial Sequence
  Description of Artificial Sequence: Synthetic polypeptide
EVQLLESGGGLVQPGGSLRLSCAASGFTFSYYNMWWVRQAPGKGLEWVSSISPSGGGTYYADSVKGRFTISRDNSKNTLYLQMNSLRAEDTAVYYCAKDRAYGDYVGWNGFDYWGQGTLVTVSS

SEQ ID NO: 1246 - protein, 108 aa, Artificial Sequence; identical to SEQ ID NO: 10
  Description of Artificial Sequence: Synthetic polypeptide

SEQ ID NO: 1247 - protein, 124 aa, Artificial Sequence
  Description of Artificial Sequence: Synthetic polypeptide
EVQLLESGGGLVQPGGSLRLSCAASGFTFSYYPMFWVRQAPGKGLEWVSYISPSGGWTDYADSVKGRFTISRDNSKNTLYLQMNSLRAEDTAVYYCAKDRAYGDYVGWNGFDYWGQGTLVTVSS

SEQ ID NO: 1248 - protein, 108 aa, Artificial Sequence; identical to SEQ ID NO: 10
  Description of Artificial Sequence: Synthetic polypeptide

SEQ ID NO: 1249 - protein, 124 aa, Artificial Sequence
  Description of Artificial Sequence: Synthetic polypeptide
EVQLLESGGGLVQPGGSLRLSCAASGFTFSYYPMIWVRQAPGKGLEWVSWISPSGGGTQYADSVKGRFTISRDNSKNTLYLQMNSLRAEDTAVYYCAKDRAYGDYVGWNGFDYWGQGTLVTVSS

SEQ ID NO: 1250 - protein, 108 aa, Artificial Sequence; identical to SEQ ID NO: 10
  Description of Artificial Sequence: Synthetic polypeptide

SEQ ID NO: 1251 - protein, 123 aa, Artificial Sequence
  Description of Artificial Sequence: Synthetic polypeptide
EVQLLESGGGLVQPGGSLRLSCAASGFTFSYYPMVWVRQAPGKGLEWVSYIWPSGGTYYADSVKGRFTISRDNSKNTLYLQMNSLRAEDTAVYYCAKDRAYGDYVGWNGFDYWGQGTLVTVSS

SEQ ID NO: 1252 - protein, 108 aa, Artificial Sequence; identical to SEQ ID NO: 10
  Description of Artificial Sequence: Synthetic polypeptide

SEQ ID NO: 1253 - protein, 124 aa, Artificial Sequence
  Description of Artificial Sequence: Synthetic polypeptide
EVQLLESGGGLVQPGGSLRLSCAASGFTFSYYPMWWVRQAPGKGLEWVSSIVPSGGATFYADSVKGRFTISRDNSKNTLYLQMNSLRAEDTAVYYCAKDRAYGDYVGWNGFDYWGQGTLVTVSS

SEQ ID NO: 1254 - protein, 108 aa, Artificial Sequence; identical to SEQ ID NO: 10
  Description of Artificial Sequence: Synthetic polypeptide

SEQ ID NO: 1255 - protein, 124 aa, Artificial Sequence
  Description of Artificial Sequence: Synthetic polypeptide
EVQLLESGGGLVQPGGSLRLSCAASGFTFSYYPMWWVRQAPGKGLEWVSVIYPSGGATFYADSVKGRFTISRDNSKNTLYLQMNSLRAEDTAVYYCAKDRAYGDYVGWNGFDYWGQGTLVTVSS

SEQ ID NO: 1256 - protein, 108 aa, Artificial Sequence; identical to SEQ ID NO: 10
  Description of Artificial Sequence: Synthetic polypeptide

SEQ ID NO: 1257 - protein, 124 aa, Artificial Sequence
  Description of Artificial Sequence: Synthetic polypeptide
EVQLLESGGGLVQPGGSLRLSCAASGFTFSYYPMWWVRQAPGKGLEWVSYISSSGGGTHYADSVKGRFTISRDNSKNTLYLQMNSLRAEDTAVYYCAKDRAYGDYVGWNGFDYWGQGTLVTVSS

SEQ ID NO: 1258 - protein, 108 aa, Artificial Sequence; identical to SEQ ID NO: 10
  Description of Artificial Sequence: Synthetic polypeptide

SEQ ID NO: 1259 - protein, 124 aa, Artificial Sequence
  Description of Artificial Sequence: Synthetic polypeptide
EVQLLESGGGLVQPGGSLRLSCAASGFTFSYYPMWWVRQAPGKGLEWVSYIVPSGGATFYADSVKGRFTISRDNSKNTLYLQMNSLRAEDTAVYYCAKDRAYGDYVGWNGFDYWGQGTLVTVSS

SEQ ID NO: 1260 - protein, 148 aa, Homo sapiens [sequence omitted]

SEQ ID NO: 1261 - DNA, 1955 bp, Homo sapiens
acactttgcgttccgcggccccggccccttggtttcctagtcctggctccattcccctctcaggcctagggctgggacccctccccgcccccggtcttggccctgcccccttcaacagacggtccgccccggcccctccccctcgtcccgcccggccctggcaggccccgccccctgcggcctctacctttgacgtcttcccccgggaggtggcgggggtctgcgaccgaatgccggcgggactctgggtcagggcttctggcgggccctgcggggggcagcgaggtgaccgtgaacctgcggctcatggcgcggaaaggagccaggcggccgcggcaaggtccgggatcgcacaagtggctgcaaccaggctctaggagggagaaagagcggatcccccaaccccctccgcccgcccgccccccgcgagacgcggcgccgcgcagggtcctagtgcccgctgtgcgaagggttcctgaatctggccacttcgctgggaggccctgggctccccagtgccacccgaagggcctgaggaggccatctgcagaatctcactctgtcgcccaggccggagtgcagtgtcatgatcttggctcactgcaacctccgcctcccagttcaggagattctcctgcctcagcctcccgggtggctgggattacaagcacagtgcctggcacattatcggcacttgatgactgttgtctaataactgagcttccatacaaaccacctgccgtcctgtactgaaggagaaagagcttccagccggggaggcaggaaatctgggtcctggtcttggttgcatccctgacttcctaaatgacctggagaaggcctctgcctctgctgggatcttgtctgtgctggggcatttgtttccatttccaagggctttttcttcctcgctcagaatttgaccactcactaagaggagcttagtgtggtgtctcacgaagggatcctcctcagccctcacctcggtactggaagacgtcgtgcgtgtccaaaggcaccccggggaacatccggtccacctcgctggcgctccggggatccaccatctgcgccttcacgtcgaacctgcgggcaggcgcggaggagacaggtgctgagccggctagcggacggaccgacggcgcccgggctccccctgccggcggccgcggcggcgctcacctccagaggcgccgcccgctgaacagcagcatcttccccctgccactccggagggccccggtcacctgggccacgtcggcgcccaggcccagcttgtccagacgcctcgggcccagcaccgacgcgcctgtgtacacccacacctggcgccctgcaggggaggagggtcacgtcggtttgggggcgcagagggagcacgtactcctagaacgcgaggagggagattccggcgaggcctttcctagcccgcgtgcccgcagtccctgcaacccaggggcagaggcgctgggtagagcgacgcgagggcgtggagaggagggggcagaaactcagccgcccctacgtttgctaaactgcgtccgccagggggcgtatttttctaaaacgcacaagacgtttcgtgggttatcgatggtctcttgagcctccttgactgatggggattgaccgggcgggggagggaaagtaggtaactaaccagagaagaagaaaagcttcttggagagcggctcctcaaagaccgagtccagcttgcggggcagcgcgggccacttgtcggcgataaggaaggggccctgcggccggctccccctgccctcagagaatcgccagtacttcctgagaaagcgaggagggaaaggacgggctctaagccttggacacagggccagtgggcgggaagggacgggcagcccctccgcaaagccccctcccgcatccacacaaccccgcctcctcacccatccttgaacaaatacagctggttcccaatc

SEQ ID NO: 1262 - protein, 730 aa, Mus musculus
MSPWQPLLLALLAFGCSSAAPYQRQPTFVVFPKDLKTSNLTDTQLAEAYLYRYGYTRAAQMMGEKQSLRPALLMLQKQLSLPQTGELDSQTLKAIRTPRCGVPDVGRFQTFKGLKWDHHNITYWIQNYSEDLPRDMIDDAFARAFAVWGEVAPLTFTRVYGPEADIVIQFGVAEHGDGYPFDGKDGLLAHAFPPGAGVQGDAHFDDDELWSLGKGVVIPTYYGNSNGAPCHFPFTFEGRSYSACTTDGRNDGTPWCSTTADYDKDGKFGFCPSERLYTEHGNGEGKPCVFPFIFEGRSYSACTTKGRSDGYRWCATTANYDQDKLYGFCPTRVDATVVGGNSAGELCVFPFVFLGKQYSSCTSDGRRDGRLWCATTSNFDTDKKWGFCPDQGYSLFLVAAHEFGHALGLDHSSVPEALMYPLYSYLEGFPLNKDDIDGIQYLYGRGSKPDPRPPATTTTEPQPTAPPTMCPTIPPTAYPTVGPTVGPTGAPSPGPTSSPSPGPTGAPSPGPTAPPTAGSSEASTESLSPADNPCNVDVFDAIAEIQGALHFFKDGWYWKFLNHRGSPLQGPFLTARTWPALPATLDSAFEDPQTKRVFFFSGRQMWVYTGKTVLGPRSLDKLGLGPEVTHVSGLLPRRLGKALLFSKGRVWRFDLKSQKVDPQSVIRVDKEFSGVPWNSHDIFQYQDKAYFCHGKFFWRVSFQNEVNKVDHEVNQVDDVGYVTYDLLQCP

SEQ ID NO: 1263 - DNA, 3185 bp, Mus musculus
ctcaccatgagtccctggcagcccctgctcctggctctcctggctttcggctgcagctctgctgccccttaccagcgccagccgacttttgtggtcttccccaaagacctgaaaacctccaacctcacggacacccagctggcagaggcatacttgtaccgctatggttacacccgggccgcccagatgatgggagagaagcagtctctacggccggctttgctgatgcttcagaagcagctctccctgccccagactggtgagctggacagccagacactaaaggccattcgaacaccacgctgtggtgtcccagacgtgggtcgattccaaaccttcaaaggcctcaagtgggaccatcataacatcacatactggatccaaaactactctgaagacttgccgcgagacatgatcgatgacgccttcgcgcgcgccttcgcggtgtggggcgaggtggcacccctcaccttcacccgcgtgtacggacccgaagcggacattgtcatccagtttggtgtcgcggagcacggagacgggtatcccttcgacggcaaggacggccttctggcacacgcctttccccctggcgccggcgttcagggagatgcccatttcgacgacgacgagttgtggtcgctgggcaaaggcgtcgtgatccccacttactatggaaactcaaatggtgccccatgtcactttcccttcaccttcgagggacgctcctattcggcctgcaccacagacggccgcaacgacggcacgccttggtgtagcacaacagctgactacgataaggacggcaaatttggtttctgccctagtgagagactctacacggagcacggcaacggagaaggcaaaccctgtgtgttcccgttcatctttgagggccgctcctactctgcctgcaccactaaaggccgctcggatggttaccgctggtgcgccaccacagccaactatgaccaggataaactgtatggcttctgccctacccgagtggacgcgaccgtagttgggggcaactcggcaggagagctgtgcgtcttccccttcgtcttcctgggcaagcagtactcttcctgtaccagcgacggccgcagggatgggcgcctctggtgtgcgaccacatcgaacttcgacactgacaagaagtggggtttctgtccagaccaagggtacagcctgttcctggtggcagcgcacgagttcggccatgcactgggcttagatcattccagcgtgccggaagcgctcatgtacccgctgtatagctacctcgagggcttccctctgaataaagacgacatagacggcatccagtatctgtatggtcgtggctctaagcctgacccaaggcctccagccaccaccacaactgaaccacagccgacagcacctcccactatgtgtcccactatacctcccacggcctatcccacagtgggccccacggttggccctacaggcgccccctcacctggccccacaagcagcccgtcacctggccctacaggcgccccctcacctggccctacagcgccccctactgcgggctcttctgaggcctctacagagtctttgagtccggcagacaatccttgcaatgtggatgtttttgatgctattgctgagatccagggcgctctgcatttcttcaaggacggttggtactggaagttcctgaatcatagaggaagcccattacagggccccttccttactgcccgcacgtggccagccctgcctgcaacgctggactccgcctttgaggatccgcagaccaagagggttttcttcttctctggacgtcaaatgtgggtgtacacaggcaagaccgtgctgggccccaggagtctggataagttgggtctaggcccagaggtaacccacgtcagcgggcttctcccgcgtcgtctcgggaaggctctgctgttcagcaaggggcgtgtctggagattcgacttgaagtctcagaaggtggatccccagagcgtcattcgcgtggataaggagttctctggtgtgccctggaactcacacgacatcttccagtaccaagacaaagcctatttctgccatggcaaattcttctggcgtgtgagtttccaaaatgaggtgaacaaggtggaccatgaggtgaaccaggtggacgacgtgggctacgtgacctacgacctcctgcagtgcccttgaactagggctccttctttgcttcaaccgtgcagtgcaagtctctagagaccaccaccaccaccaccacacacaaaccccatccgagggaaaggtgctagctggccaggtacagactggtgatctcttctagagactgggaaggagtggaggcaggcagggctctctctgcccaccgtcctttcttgttggactgtttctaataaacacggatccccaaccttttccagctactttagtcaatcagcttatctgtagttgcagatgcatccgagcaagaagacaactttgtagggtggattctgaccttttatttttgtgtggcgtctgagaattgaatcagctggcttttgtgacaggcacttcaccggctaaaccacctctcccgactccagcccttttatttattatgtatgaggttatgttcacatgcatgtatttaacccacagaatgcttactgtgtgtcgggcgcggctccaaccgctgcataaatattaaggtattcagttgcccctactggaaggtattatgtaactatttctctcttacattggagaacaccaccgagctatccactcatcaaacatttattgagagcatccctagggagccaggctctctactgggcgttagggacagaaatgttggttcttccttcaaggattgctcagagattctccgtgtcctgtaaatctgctgaaaccagaccccagactcctctctctcccgagagtccaactcactcactgtggttgctggcagctgcagcatgcgtatacagcatgtgtgctagagaggtagagggggtctgtgcgttatggttcaggtcagactgtgtcctccaggtgagatgacccctcagctggaactgatccaggaaggataaccaagtgtcttcctggcagtcttttttaaataaatgaataaatgaatatttacttaaaaaaaaaaaaaaaaaaaaaaaaaaaaaaaaaaaaaaaaaaaaaaa

SEQ ID NO: 1264 - protein, 730 aa, Mus musculus; identical to SEQ ID NO: 1262

SEQ ID NO: 1265 - DNA, 21 bp, Artificial Sequence
  Description of Artificial Sequence: Synthetic oligonucleotide
  Description of Combined DNA/RNA Molecule: Synthetic oligonucleotide
gacuugccgcgagacaugatt

SEQ ID NO: 1266 - DNA, 21 bp, Artificial Sequence
  Description of Artificial Sequence: Synthetic oligonucleotide
  Description of Combined DNA/RNA Molecule: Synthetic oligonucleotide
ucaugucucgcggcaaguctt

SEQ ID NO: 1267 - DNA, 21 bp, Artificial Sequence
  Description of Artificial Sequence: Synthetic oligonucleotide
  Description of Combined DNA/RNA Molecule: Synthetic oligonucleotide
gacuucgcgggacacaugatt

SEQ ID NO: 1268 - DNA, 21 bp, Artificial Sequence
  Description of Artificial Sequence: Synthetic oligonucleotide
  Description of Combined DNA/RNA Molecule: Synthetic oligonucleotide
ucaugugucccgcgaaguctt

SEQ ID NO: 1269 - DNA, 3065 bp, Homo sapiens
ctcaggcggtggctggaggctgcgcatctggggctttaaacatacaaagggattgccaggacctgcggcggcggcggcggcggcgggggctggggcgcgggggccggaccatgagccgctgagccgggcaaaccccaggccaccgagccagcggaccctcggagcgcagccctgcgccgcggagcaggctccaaccaggcggcgacgcggccacacgcaccgagccagcgacccccgggcgacgcgcggggccagggagcgctacgatggaggcgctaatggcccggggcgcgctcacgggtcccctgagggcgctctgtctcctgggctgcctgctgagccacgccgccgccgcgccgtcgcccatcatcaagttccccggcgatgtcgcccccaaaacggacaaagagttggcagtgcaatacctgaacaccttctatggctgccccaaggagagctgcaacctgtttgtgctgaaggacacactaaagaagatgcagaagttctttggactgccccagacaggtgatcttgaccagaataccatcgagaccatgcggaagccacgctgcggcaacccagatgtggccaactacaacttcttccctcgcaagcccaagtgggacaagaaccagatcacatacaggatcattggctacacacctgatctggacccagagacagtggatgatgcctttgctcgtgccttccaagtctggagcgatgtgaccccactgcggttttctcgaatccatgatggagaggcagacatcatgatcaactttggccgctgggagcatggcgatggatacccctttgacggtaaggacggactcctggctcatgccttcgccccaggcactggtgttgggggagactcccattttgatgacgatgagctatggaccttgggagaaggccaagtggtccgtgtgaagtatggcaacgccgatggggagtactgcaagttccccttcttgttcaatggcaaggagtacaacagctgcactgataccggccgcagcgatggcttcctctggtgctccaccacctacaactttgagaaggatggcaagtacggcttctgtccccatgaagccctgttcaccatgggcggcaacgctgaaggacagccctgcaagtttccattccgcttccagggcacatcctatgacagctgcaccactgagggccgcacggatggctaccgctggtgcggcaccactgaggactacgaccgcgacaagaagtatggcttctgccctgagaccgccatgtccactgttggtgggaactcagaaggtgccccctgtgtcttccccttcactttcctgggcaacaaatatgagagctgcaccagcgccggccgcagtgacggaaagatgtggtgtgcgaccacagccaactacgatgacgaccgcaagtggggcttctgccctgaccaagggtacagcctgttcctcgtggcagcccacgagtttggccacgccatggggctggagcactcccaagaccctggggccctgatggcacccatttacacctacaccaagaacttccgtctgtcccaggatgacatcaagggcattcaggagctctatggggcctctcctgacattgaccttggcaccggccccacccccacactgggccctgtcactcctgagatctgcaaacaggacattgtatttgatggcatcgctcagatccgtggtgagatcttcttcttcaaggaccggttcatttggcggactgtgacgccacgtgacaagcccatggggcccctgctggtggccacattctggcctgagctcccggaaaagattgatgcggtatacgaggccccacaggaggagaaggctgtgttctttgcagggaatgaatactggatctactcagccagcaccctggagcgagggtaccccaagccactgaccagcctgggactgccccctgatgtccagcgagtggatgccgcctttaactggagcaaaaacaagaagacatacatctttgctggagacaaattctggagatacaatgaggtgaagaagaaaatggatcctggctttcccaagctcatcgcagatgcctggaatgccatccccgataacctggatgccgtcgtggacctgcagggcggcggtcacagctacttcttcaagggtgcctattacctgaagctggagaaccaaagtctgaagagcgtgaagtttggaagcatcaaatccgactggctaggctgctgagctggccctggctcccacaggcccttcctctccactgccttcgatacaccgggcctggagaactagagaaggacccggaggggcctggcagccgtgccttcagctctacagctaatcagcattctcactcctacctggtaatttaagattccagagagtggctcctcccggtgcccaagaatagatgctgactgtactcctcccaggcgccccttccccctccaatcccaccaaccctcagagccacccctaaagagatcctttgatattttcaacgcagccctgctttgggctgccctggtgctgccacacttcaggctcttctcctttcacaaccttctgtggctcacagaacccttggagccaatggagactgtctcaagagggcactggtggcccgacagcctggcacagggcagtgggacagggcatggccaggtggccactccagacccctggcttttcactgctggctgccttagaacctttcttacattagcagtttgctttgtatgcactttgtttttttctttgggtcttgttttttttttccacttagaaattgcatttcctgacagaaggactcaggttgtctgaagtcactgcacagtgcatctcagcccacatagtgatggttcccctgttcactctacttagcatgtccctaccgagtctcttctccactggatggaggaaaaccaagccgtggcttcccgctcagccctccctgcccctcccttcaaccattccccatgggaaatgtcaacaagtatgaataaagacacctactgagtgaaaaaaaaaaaaaaaaaaaaa

SEQ ID NO: 1270 - protein, 660 aa, Homo sapiens
MEALMARGALTGPLRALCLLGCLLSHAAAAPSPIIKFPGDVAPKTDKELAVQYLNTFYGCPKESCNLFVLKDTLKKMQKFFGLPQTGDLDQNTIETMRKPRCGNPDVANYNFFPRKPKWDKNQITYRIIGYTPDLDPETVDDAFARAFQVWSDVTPLRFSRIHDGEADIMINFGRWEHGDGYPFDGKDGLLAHAFAPGTGVGGDSHFDDDELWTLGEGQVVRVKYGNADGEYCKFPFLFNGKEYNSCTDTGRSDGFLWCSTTYNFEKDGKYGFCPHEALFTMGGNAEGQPCKFPFRFQGTSYDSCTTEGRTDGYRWCGTTEDYDRDKKYGFCPETAMSTVGGNSEGAPCVFPFTFLGNKYESCTSAGRSDGKMWCATTANYDDDRKWGFCPDQGYSLFLVAAHEFGHAMGLEHSQDPGALMAPIYTYTKNFRLSQDDIKGIQELYGASPDIDLGTGPTPTLGPVTPEICKQDIVFDGIAQIRGEIFFFKDRFIWRTVTPRDKPMGPLLVATFWPELPEKIDAVYEAPQEEKAVFFAGNEYWIYSASTLERGYPKPLTSLGLPPDVQRVDAAFNWSKNKKTYIFAGDKFWRYNEVKKKMDPGFPKLIADAWNAIPDNLDAVVDLQGGGHSYFFKGAYYLKLENQSLKSVKFGSIKSDWLGC

SEQ ID NO: 1271 - DNA, 3070 bp, Mus musculus
ccagccggccacatctggcgtctgcccgcccttgtttccgctgcatccagacttccctggtggctggaggctctgtgtgcatccaggagtttagatatacaaagggattgccaggacctgcaagcacccgcggcagtggtgtgtattgggacgtgggaccccgttatgagctcctgagccccgagaagcagaggcagtagagtaaggggatcgccgtgcagggcaggcgccagccgggcggaccccagggcacagccagagacctcagggtgacacgcggagcccgggagcgcaacgatggaggcacgagtggcctggggagcgctggccggacctctgcgggttctctgcgtcctgtgctgcctgttgggccgcgccatcgctgcaccatcgcccatcatcaagttccccggcgatgtcgcccctaaaacagacaaagagttggcagtgcaatacctgaacactttctatggctgccccaaggagagttgcaacctctttgtgctgaaagataccctcaagaagatgcagaagttctttgggctgccccagacaggtgaccttgaccagaacaccatcgagaccatgcggaagccaagatgtggcaacccagatgtggccaactacaacttcttcccccgcaagcccaagtgggacaagaaccagatcacatacaggatcattggttacacacctgacctggaccctgaaaccgtggatgatgcttttgctcgggccttaaaagtatggagcgacgtcactccgctgcgcttttctcgaatccatgatggggaggctgacatcatgatcaactttggacgctgggagcatggagatggatacccatttgatggcaaggatggactcctggcacatgcctttgccccgggcactggtgttgggggagattctcactttgatgatgatgagctgtggaccctgggagaaggacaagtggtccgcgtaaagtatgggaacgctgatggcgagtactgcaagttccccttcctgttcaacggtcgggaatacagcagctgtacagacactggtcgcagtgatggcttcctctggtgctccaccacatacaactttgagaaggatggcaagtatggcttctgcccccatgaagccttgtttaccatgggtggcaatgcagatggacagccctgcaagttcccgttccgcttccagggcacctcctacaacagctgtaccaccgagggccgcaccgatggctaccgctggtgtggcaccaccgaggactatgaccgggataagaagtatggattctgtcccgagaccgctatgtccactgtgggtggaaattcagaaggtgccccatgtgtcttccccttcactttcctgggcaacaagtatgagagctgcaccagcgccggccgcaacgatggcaaggtgtggtgtgcgaccacaaccaactacgatgatgaccggaagtggggcttctgtcctgaccaaggatatagcctattcctcgtggcagcccatgagttcggccatgccatggggctggaacactctcaggaccctggagctctgatggccccgatctacacctacaccaagaacttccgattatcccatgatgacatcaaggggatccaggagctctatgggccctcccccgatgctgatactgacactggtactggccccacaccaacactgggacctgtcactccggagatctgcaaacaggacattgtctttgatggcatcgctcagatccgtggtgagatcttcttcttcaaggaccggtttatttggcggacagtgacaccacgtgacaagcccacaggtcccttgctggtggccacattctggcctgagctcccagaaaagattgacgctgtgtatgaggccccacaggaggagaaggctgtgttcttcgcagggaatgagtactgggtctattctgctagtactctggagcgaggataccccaagccactgaccagcctggggttgccccctgatgtccagcaagtagatgctgcctttaactggagtaagaacaagaagacatacatctttgcaggagacaagttctggagatacaatgaagtgaagaagaaaatggaccccggtttccctaagctcatcgcagactcctggaatgccatccctgataacctggatgccgtcgtggacctgcagggtggtggtcatagctacttcttcaagggtgcttattacctgaagctggagaaccaaagtctcaagagcgtgaagtttggaagcatcaaatcagactggctgggctgctgagctggccctgttcccacgggccctatcatcttcatcgctgcacaccaggtgaaggatgtgaagcagcctggcggctctgtcctcctctgtagttaaccagccttctccttcacctggtgacttcagatttaagagggtggcttctttttgtgcccaaagaaaggtgctgactgtaccctcccgggtgctgcttctccttcctgcccaccctaggggatgcttggatatttgcaatgcagccctcctctgggctgccctggtgctccactcttctggttcttcaacatctatgacctttttatggctttcagcactctcagagttaatagagactggcttaggagggcactggtggccctgttaacagcctggcatggggcagtggggtacaggtgtgccaaggtggaaatcagagacacctggtttcaccctttctgctgcccagacacctgcaccaccttaactgttgcttttgtatgcccttcgctcgtttccttcaaccttttcagttttccactccactgcatttcctgcccaaaggactcgggttgtctgacatcgctgcatgatgcatctcagcccgcctagtgatggttcccctcctcactctgtgcagatcatgcccagtcacttcctccactggatggaggagaaccaagtcagtggcttcctgctcagccttcttgcttctccctttaacagttccccatgggaaatggcaaacaagtataaataaagacacccattgagtgacaaaaaaaaaaaaaaaaaaaaaaaaaaaaaa

SEQ ID NO: 1272 - protein, 662 aa, Mus musculus
MEARVAWGALAGPLRVLCVLCCLLGRAIAAPSPIIKFPGDVAPKTDKELAVQYLNTFYGCPKESCNLFVLKDTLKKMQKFFGLPQTGDLDQNTIETMRKPRCGNPDVANYNFFPRKPKWDKNQITYRIIGYTPDLDPETVDDAFARALKVWSDVTPLRFSRIHDGEADIMINFGRWEHGDGYPFDGKDGLLAHAFAPGTGVGGDSHFDDDELWTLGEGQVVRVKYGNADGEYCKFPFLFNGREYSSCTDTGRSDGFLWCSTTYNFEKDGKYGFCPHEALFTMGGNADGQPCKFPFRFQGTSYNSCTTEGRTDGYRWCGTTEDYDRDKKYGFCPETAMSTVGGNSEGAPCVFPFTFLGNKYESCTSAGRNDGKVWCATTTNYDDDRKWGFCPDQGYSLFLVAAHEFGHAMGLEHSQDPGALMAPIYTYTKNFRLSHDDIKGIQELYGPSPDADTDTGTGPTPTLGPVTPEICKQDIVFDGIAQIRGEIFFFKDRFIWRTVTPRDKPTGPLLVATFWPELPEKIDAVYEAPQEEKAVFFAGNEYWVYSASTLERGYPKPLTSLGLPPDVQQVDAAFNWSKNKKTYIFAGDKFWRYNEVKKKMDPGFPKLIADSWNAIPDNLDAVVDLQGGGHSYFFKGAYYLKLENQSLKSVKFGSIKSDWLGC

SEQ ID NO: 1273 - DNA, 21 bp, Artificial Sequence
  Description of Artificial Sequence: Synthetic oligonucleotide
  Description of Combined DNA/RNA Molecule: Synthetic oligonucleotide
cuuuagauauacaaagggatt

SEQ ID NO: 1274 - DNA, 21 bp, Artificial Sequence
  Description of Artificial Sequence: Synthetic oligonucleotide
  Description of Combined DNA/RNA Molecule: Synthetic oligonucleotide
ucccuuuguauaucuaaagtt

SEQ ID NO: 1275 - DNA, 21 bp, Artificial Sequence
  Description of Artificial Sequence: Synthetic oligonucleotide
  Description of Combined DNA/RNA Molecule: Synthetic oligonucleotide
ggagaguugcaaccucuuutt

SEQ ID NO: 1276 - DNA, 21 bp, Artificial Sequence
  Description of Artificial Sequence: Synthetic oligonucleotide
  Description of Combined DNA/RNA Molecule: Synthetic oligonucleotide
aaagagguugcaacucucctt

SEQ ID NO: 1277 - protein, 4 aa, Artificial Sequence
  Description of Artificial Sequence: Synthetic peptide
GFLG

SEQ ID NO: 1278 - protein, 8 aa, Artificial Sequence
  Description of Artificial Sequence: Synthetic peptide
  MOD_RES (1)..(1): Mca-Pro
  MOD_RES (4)..(4): Cys(Mob)
  MOD_RES (8)..(8): Dap(Dnp)
  C-term amidated
PLACWARX

SEQ ID NO: 1279 - protein, 110 aa, Artificial Sequence
  Description of Artificial Sequence: Synthetic polypeptide
QYELTQPRSVSGSPGQSVTISCTGTSSDVGGYNYVSWYQQHPGKAPKLMIYDVSKRPSGVPDRFSGSKSGNTASLTISGLQAEDEADYYCCSYAGSYTLVFGGGTKLTVL

SEQ ID NO: 1280 - protein, 124 aa, Artificial Sequence
  Description of Artificial Sequence: Synthetic polypeptide
EVQLLESGGGLVQPGGSLRLSCAASGFTFSTYQMVWVRQAPGKGLEWVSVIYPSGGPTVYADSVKGRFTISRDNSKNTLYLQMNSLRAEDTAVYYCARGEDYYDSSGPGAFDIWGQGTMVTVSS

SEQ ID NO: 1281 - DNA, 372 bp, Artificial Sequence
  Description of Artificial Sequence: Synthetic polynucleotide
ttctattctcacagtgcacagagcgaattgactcagccaccgtcagcgtctgcggcccccgggcagagggtcaccatctcttgttctggaagcagctccaacatcggaagtaacactgtaacctggtaccagaagctcccaggaacggcccccaagctcctcatttacaataattatgagcggccctcaggggtccctgcccgattctctggctccaagtctggcacctcagcctccctggccatcagtgggctccagtctgaggatgaggctgattattactgtgcaacatgggatgacagcctgattgccaattacgtcttcggaagtgggaccaaggtcaccgtcctaggtcagcccaaggccaacccc

SEQ ID NO: 1282 - protein, 124 aa, Artificial Sequence
  Description of Artificial Sequence: Synthetic polypeptide
FYSHSAQSELTQPPSASAAPGQRVTISCSGSSSNIGSNTVTWYQKLPGTAPKLLIYNNYERPSGVPARFSGSKSGTSASLAISGLQSEDEADYYCATWDDSLIANYVFGSGTKVTVLGQPKANP

SEQ ID NO: 1283 - DNA, 483 bp, Artificial Sequence
  Description of Artificial Sequence: Synthetic polynucleotide
atgaagaagctcctctttgctatcccgctcgtcgttccttttgtggcccagccggccatggccgaagttcaattgttagagtctggtggcggtcttgttcagcctggtggttctttacgtctttcttgcgctgcttccggattcactttctctccttaccttatgaattgggttcgccaagctcctggtaaaggtttggagtgggtttcttctatctattcttctggtggcggtactggttatgctgactccgttaaaggtcgcttcactatctctagagacaactctaagaatactctctacttgcagatgaacagcttaagggctgaggacacggccgtgtattactgtgcgagaatataccatagcagcagtggacctttctacggtatggacgtctggggccaagggaccacggtcaccgtctcaagcgcctccaccaagggcccatcggtcttcccgctagcaccctcctccaagagc

SEQ ID NO: 1284 - protein, 161 aa, Artificial Sequence
  Description of Artificial Sequence: Synthetic polypeptide
MKKLLFAIPLVVPFVAQPAMAEVQLLESGGGLVQPGGSLRLSCAASGFTFSPYLMNWVRQAPGKGLEWVSSIYSSGGGTGYADSVKGRFTISRDNSKNTLYLQMNSLRAEDTAVYYCARIYHSSSGPFYGMDVWGQGTTVTVSSASTKGPSVFPLAPSSKS

SEQ ID NO: 1285 - protein, 115 aa, Artificial Sequence
  Description of Artificial Sequence: Synthetic polypeptide
EVQLLESGGGLVQPGGSLRLSCAASGFTFSLYSMNWVRQAPGKGLEWVSSIYSSGGSTLYADSVKGRFTISRDNSKNTLYLQMNSLRAEDTAVYYCARGRAFDIWGQGTMVTVSS

SEQ ID NO: 1286 - protein, 108 aa, Artificial Sequence
  Description of Artificial Sequence: Synthetic polypeptide
DIQMTQSPSSLSASVGDRVTITCRASQSVGTYLNWYQQKPGKAPKLLIYATSNLRSGVPSRFSGSGSGTDFTLTISSLQPEDFATYYCQQSYSIPRFTFGPGTKVDIK

SEQ ID NO: 1287 - protein, 6 aa, Artificial Sequence
  Description of Artificial Sequence: Synthetic peptide
VGYRSW

SEQ ID NO: 1288 - protein, 11 aa, Artificial Sequence
  Description of Artificial Sequence: Synthetic peptide
RASQSISSFLA

SEQ ID NO: 1289 - protein, 7 aa, Artificial Sequence
  Description of Artificial Sequence: Synthetic peptide
DASYRAT

SEQ ID NO: 1290 - protein, 9 aa, Artificial Sequence
  Description of Artificial Sequence: Synthetic peptide
QQRGNWPIT

SEQ ID NO: 1291 - protein, 5 aa, Artificial Sequence
  Description of Artificial Sequence: Synthetic peptide
QYPMW

SEQ ID NO: 1292 - protein, 17 aa, Artificial Sequence
  Description of Artificial Sequence: Synthetic peptide
YIVPSGGRTYYADSVKG

SEQ ID NO: 1293 - protein, 15 aa, Artificial Sequence
  Description of Artificial Sequence: Synthetic peptide
DRAYGDYVGWNGFDY

SEQ ID NO: 1294 - protein, 11 aa, Artificial Sequence
  Description of Artificial Sequence: Synthetic peptide
RASQNVARFLA

SEQ ID NO: 1295 - protein, 7 aa, Artificial Sequence
  Description of Artificial Sequence: Synthetic peptide
SASNRAT

SEQ ID NO: 1296 - protein, 9 aa, Artificial Sequence
  Description of Artificial Sequence: Synthetic peptide
QQRGNWPIT

SEQ ID NO: 1297 - protein, 5 aa, Artificial Sequence
  Description of Artificial Sequence: Synthetic peptide
QYPMW

SEQ ID NO: 1298 - protein, 17 aa, Artificial Sequence
  Description of Artificial Sequence: Synthetic peptide
YIVPSGGRTYYADSVKG

SEQ ID NO: 1299 - protein, 15 aa, Artificial Sequence
  Description of Artificial Sequence: Synthetic peptide
DRAYGDYVGWNGFDY

SEQ ID NO: 1300 - protein, 11 aa, Artificial Sequence
  Description of Artificial Sequence: Synthetic peptide
RASQNVHTYLA

SEQ ID NO: 1301 - protein, 7 aa, Artificial Sequence
  Description of Artificial Sequence: Synthetic peptide
EASNRAT

SEQ ID NO: 1302 - protein, 9 aa, Artificial Sequence
  Description of Artificial Sequence: Synthetic peptide
QQRGGWPIT

SEQ ID NO: 1303 - protein, 5 aa, Artificial Sequence
  Description of Artificial Sequence: Synthetic peptide
QYPMW

SEQ ID NO: 1304 - protein, 17 aa, Artificial Sequence
  Description of Artificial Sequence: Synthetic peptide
YIVPSGGRTYYADSVKG

SEQ ID NO: 1305 - protein, 15 aa, Artificial Sequence
  Description of Artificial Sequence: Synthetic peptide
DRAYGDYVGWNGFDY

SEQ ID NO: 1306 - protein, 11 aa, Artificial Sequence
  Description of Artificial Sequence: Synthetic peptide
RASQSISSFLA

SEQ ID NO: 1307 - protein, 7 aa, Artificial Sequence
  Description of Artificial Sequence: Synthetic peptide
DASYRAT

SEQ ID NO: 1308 - protein, 9 aa, Artificial Sequence
  Description of Artificial Sequence: Synthetic peptide
QQRGNWPIT

SEQ ID NO: 1309 - protein, 5 aa, Artificial Sequence
  Description of Artificial Sequence: Synthetic peptide
VYPMI

SEQ ID NO: 1310 - protein, 17 aa, Artificial Sequence
  Description of Artificial Sequence: Synthetic peptide
YISPSGGFTGYADSVKG

SEQ ID NO: 1311 - protein, 15 aa, Artificial Sequence
  Description of Artificial Sequence: Synthetic peptide
DRAYGDYVGWNGFDY

SEQ ID NO: 1312 - protein, 11 aa, Artificial Sequence
  Description of Artificial Sequence: Synthetic peptide
RASQSISSFLA

SEQ ID NO: 1313 - protein, 7 aa, Artificial Sequence
  Description of Artificial Sequence: Synthetic peptide
DASYRAT

SEQ ID NO: 1314 - protein, 9 aa, Artificial Sequence
  Description of Artificial Sequence: Synthetic peptide
QQRGNWPIT

SEQ ID NO: 1315 - protein, 5 aa, Artificial Sequence
  Description of Artificial Sequence: Synthetic peptide
DYPMW

SEQ ID NO: 1316 - protein, 17 aa, Artificial Sequence
  Description of Artificial Sequence: Synthetic peptide
VIYPSGGATFYADSVKG

SEQ ID NO: 1317 - protein, 15 aa, Artificial Sequence
  Description of Artificial Sequence: Synthetic peptide
DRAYGDYVGWNGFDY

SEQ ID NO: 1318 - protein, 11 aa, Artificial Sequence
  Description of Artificial Sequence: Synthetic peptide
RASQSISSFLA

SEQ ID NO: 1319 - protein, 7 aa, Artificial Sequence
  Description of Artificial Sequence: Synthetic peptide
DASYRAT

SEQ ID NO: 1320 - protein, 9 aa, Artificial Sequence
  Description of Artificial Sequence: Synthetic peptide
QQRGNWPIT

SEQ ID NO: 1321 - protein, 5 aa, Artificial Sequence
  Description of Artificial Sequence: Synthetic peptide
TYPMI

SEQ ID NO: 1322 - protein, 17 aa, Artificial Sequence
  Description of Artificial Sequence: Synthetic peptide
YISPSGGYTGYADSVKG

SEQ ID NO: 1323 - protein, 15 aa, Artificial Sequence
  Description of Artificial Sequence: Synthetic peptide
DRAYGDYVGWNGFDY

SEQ ID NO: 1324 - protein, 11 aa, Artificial Sequence
  Description of Artificial Sequence: Synthetic peptide
RASQSISSFLA

SEQ ID NO: 1325 - protein, 7 aa, Artificial Sequence
  Description of Artificial Sequence: Synthetic peptide
DASYRAT

SEQ ID NO: 1326 - protein, 9 aa, Artificial Sequence
  Description of Artificial Sequence: Synthetic peptide
QQRGNWPIT

SEQ ID NO: 1327 - protein, 5 aa, Artificial Sequence
  Description of Artificial Sequence: Synthetic peptide
HYDMW

SEQ ID NO: 1328 - protein, 17 aa, Artificial Sequence
  Description of Artificial Sequence: Synthetic peptide
VIYSSGGPTFYADSVKG

SEQ ID NO: 1329 - protein, 15 aa, Artificial Sequence
  Description of Artificial Sequence: Synthetic peptide
DRAYGDYVGWNGFDY

SEQ ID NO: 1330 - protein, 11 aa, Artificial Sequence
  Description of Artificial Sequence: Synthetic peptide
RASQSISSFLA

SEQ ID NO: 1331 - protein, 7 aa, Artificial Sequence
  Description of Artificial Sequence: Synthetic peptide
DASYRAT

SEQ ID NO: 1332 - protein, 9 aa, Artificial Sequence
  Description of Artificial Sequence: Synthetic peptide
QQRGNWPIT

SEQ ID NO: 1333 - protein, 5 aa, Artificial Sequence
  Description of Artificial Sequence: Synthetic peptide
HYPMW

SEQ ID NO: 1334 - protein, 17 aa, Artificial Sequence
  Description of Artificial Sequence: Synthetic peptide
SISPSGGATYYADSVKG

SEQ ID NO: 1335 - protein, 15 aa, Artificial Sequence
  Description of Artificial Sequence: Synthetic peptide
DRAYGDYVGWNGFDY

SEQ ID NO: 1336 - protein, 11 aa, Artificial Sequence
  Description of Artificial Sequence: Synthetic peptide
RASQSISSFLA

SEQ ID NO: 1337 - protein, 7 aa, Artificial Sequence
  Description of Artificial Sequence: Synthetic peptide
DASYRAT

SEQ ID NO: 1338 - protein, 9 aa, Artificial Sequence
  Description of Artificial Sequence: Synthetic peptide
QQRGNWPIT

SEQ ID NO: 1339 - protein, 5 aa, Artificial Sequence
  Description of Artificial Sequence: Synthetic peptide
KYPMW

SEQ ID NO: 1340 - protein, 17 aa, Artificial Sequence
  Description of Artificial Sequence: Synthetic peptide
SIYPSGGATFYADSVKG

SEQ ID NO: 1341 - protein, 15 aa, Artificial Sequence
  Description of Artificial Sequence: Synthetic peptide
DRAYGDYVGWNGFDY

SEQ ID NO: 1342 - protein, 11 aa, Artificial Sequence
  Description of Artificial Sequence: Synthetic peptide
RASQSISSFLA

SEQ ID NO: 1343 - protein, 7 aa, Artificial Sequence
  Description of Artificial Sequence: Synthetic peptide
DASYRAT

SEQ ID NO: 1344 - protein, 9 aa, Artificial Sequence
  Description of Artificial Sequence: Synthetic peptide
QQRGNWPIT

SEQ ID NO: 1345 - protein, 5 aa, Artificial Sequence
  Description of Artificial Sequence: Synthetic peptide
HYDML

SEQ ID NO: 1346 - protein, 17 aa, Artificial Sequence
  Description of Artificial Sequence: Synthetic peptide
YISSSGGYTGYADSVKG

SEQ ID NO: 1347 - protein, 15 aa, Artificial Sequence
  Description of Artificial Sequence: Synthetic peptide
DRAYGDYVGWNGFDY

SEQ ID NO: 1348 - protein, 11 aa, Artificial Sequence
  Description of Artificial Sequence: Synthetic peptide
RASQSISSFLA

SEQ ID NO: 1349 - protein, 7 aa, Artificial Sequence
  Description of Artificial Sequence: Synthetic peptide
DASYRAT

SEQ ID NO: 1350 - protein, 9 aa, Artificial Sequence
  Description of Artificial Sequence: Synthetic peptide
QQRGNWPIT

SEQ ID NO: 1351 - protein, 5 aa, Artificial Sequence
  Description of Artificial Sequence: Synthetic peptide
KYPMW

SEQ ID NO: 1352 - protein, 17 aa, Artificial Sequence
  Description of Artificial Sequence: Synthetic peptide
YISSSGGGTFYADSVKG

SEQ ID NO: 1353 - protein, 15 aa, Artificial Sequence
  Description of Artificial Sequence: Synthetic peptide
DRAYGDYVGWNGFDY

SEQ ID NO: 1354 - protein, 11 aa, Artificial Sequence
  Description of Artificial Sequence: Synthetic peptide
RASQSISSFLA

SEQ ID NO: 1355 - protein, 7 aa, Artificial Sequence
  Description of Artificial Sequence: Synthetic peptide
DASYRAT

SEQ ID NO: 1356 - protein, 9 aa, Artificial Sequence
  Description of Artificial Sequence: Synthetic peptide
QQRGNWPIT

SEQ ID NO: 1357 - protein, 5 aa, Artificial Sequence
  Description of Artificial Sequence: Synthetic peptide
LYDMW

SEQ ID NO: 1358 - protein, 17 aa, Artificial Sequence
  Description of Artificial Sequence: Synthetic peptide
YISSSGGATFYADSVKG

SEQ ID NO: 1359 - protein, 15 aa, Artificial Sequence
  Description of Artificial Sequence: Synthetic peptide
DRAYGDYVGWNGFDY

SEQ ID NO: 1360 - protein, 11 aa, Artificial Sequence
  Description of Artificial Sequence: Synthetic peptide
RASQSISSFLA

SEQ ID NO: 1361 - protein, 7 aa, Artificial Sequence
  Description of Artificial Sequence: Synthetic peptide
DASYRAT

SEQ ID NO: 1362 - protein, 9 aa, Artificial Sequence
  Description of Artificial Sequence: Synthetic peptide
QQRGNWPIT

SEQ ID NO: 1363 - protein, 5 aa, Artificial Sequence
  Description of Artificial Sequence: Synthetic peptide
RYPMW

SEQ ID NO: 1364 - protein, 17 aa, Artificial Sequence
  Description of Artificial Sequence: Synthetic peptide
YISPSGGFTSYADSVKG

SEQ ID NO: 1365 - protein, 15 aa, Artificial Sequence
  Description of Artificial Sequence: Synthetic peptide
DRAYGDYVGWNGFDY

SEQ ID NO: 1366 - protein, 11 aa, Artificial Sequence
  Description of Artificial Sequence: Synthetic peptide
RASQSVGRFLA

SEQ ID NO: 1367 - protein, 7 aa, Artificial Sequence
  Description of Artificial Sequence: Synthetic peptide
GASSRAT

SEQ ID NO: 1368 - protein, 9 aa, Artificial Sequence
  Description of Artificial Sequence: Synthetic peptide
QQRGNWPIT

SEQ ID NO: 1369 - protein, 5 aa, Artificial Sequence
  Description of Artificial Sequence: Synthetic peptide
QYPMW

SEQ ID NO: 1370 - protein, 17 aa, Artificial Sequence
  Description of Artificial Sequence: Synthetic peptide
YIVPSGGRTYYADSVKG

SEQ ID NO: 1371 - protein, 15 aa, Artificial Sequence
  Description of Artificial Sequence: Synthetic peptide
DRAYGDYVGWNGFDY

SEQ ID NO: 1372 - protein, 11 aa, Artificial Sequence
  Description of Artificial Sequence: Synthetic peptide
RASQNIGSDLA

SEQ ID NO: 1373 - protein, 7 aa, Artificial Sequence
  Description of Artificial Sequence: Synthetic peptide
GASSRAT

SEQ ID NO: 1374 - protein, 9 aa, Artificial Sequence
  Description of Artificial Sequence: Synthetic peptide
QQRGNWPIT

SEQ ID NO: 1375 - protein, 5 aa, Artificial Sequence
  Description of Artificial Sequence: Synthetic peptide
QYPMW

SEQ ID NO: 1376 - protein, 17 aa, Artificial Sequence
  Description of Artificial Sequence: Synthetic peptide
YIVPSGGRTYYADSVKG

SEQ ID NO: 1377 - protein, 15 aa, Artificial Sequence
  Description of Artificial Sequence: Synthetic peptide
DRAYGDYVGWNGFDY

SEQ ID NO: 1378 - protein, 11 aa, Artificial Sequence
  Description of Artificial Sequence: Synthetic peptide
RASQSVGNFLA

SEQ ID NO: 1379 - protein, 7 aa, Artificial Sequence
  Description of Artificial Sequence: Synthetic peptide
GASNRAT

SEQ ID NO: 1380 - protein, 9 aa, Artificial Sequence
  Description of Artificial Sequence: Synthetic peptide
QQRGNWPIT

SEQ ID NO: 1381 - protein, 5 aa, Artificial Sequence
  Description of Artificial Sequence: Synthetic peptide
QYPMW

SEQ ID NO: 1382 - protein, 17 aa, Artificial Sequence
  Description of Artificial Sequence: Synthetic peptide
YIVPSGGRTYYADSVKG

SEQ ID NO: 1383 - protein, 15 aa, Artificial Sequence
  Description of Artificial Sequence: Synthetic peptide
DRAYGDYVGWNGFDY

SEQ ID NO: 1384 - protein, 11 aa, Artificial Sequence
  Description of Artificial Sequence: Synthetic peptide
RASQVIFSGLA

SEQ ID NO: 1385 - protein, 7 aa, Artificial Sequence
  Description of Artificial Sequence: Synthetic peptide
AASNLQS

SEQ ID NO: 1386 - protein, 9 aa, Artificial Sequence
  Description of Artificial Sequence: Synthetic peptide
QQAQTFPFT

SEQ ID NO: 1387 - protein, 5 aa, Artificial Sequence
  Description of Artificial Sequence: Synthetic peptide
QYPMW

SEQ ID NO: 1388 - protein, 17 aa, Artificial Sequence
  Description of Artificial Sequence: Synthetic peptide
YIVPSGGRTYYADSVKG

SEQ ID NO: 1389 - protein, 15 aa, Artificial Sequence
  Description of Artificial Sequence: Synthetic peptide
DRAYGDYVGWNGFDY

SEQ ID NO: 1390 - protein, 11 aa, Artificial Sequence
  Description of Artificial Sequence: Synthetic peptide
RASQNIGRWLA

SEQ ID NO: 1391 - protein, 7 aa, Artificial Sequence
  Description of Artificial Sequence: Synthetic peptide
GASSLQT

SEQ ID NO: 1392 - protein, 9 aa, Artificial Sequence
  Description of Artificial Sequence: Synthetic peptide
QQRRKWPVT

SEQ ID NO: 1393 - protein, 5 aa, Artificial Sequence
  Description of Artificial Sequence: Synthetic peptide
QYPMW

SEQ ID NO: 1394 - protein, 17 aa, Artificial Sequence
  Description of Artificial Sequence: Synthetic peptide
YIVPSGGRTYYADSVKG

SEQ ID NO: 1395 - protein, 15 aa, Artificial Sequence
  Description of Artificial Sequence: Synthetic peptide
DRAYGDYVGWNGFDY

SEQ ID NO: 1396 - protein, 11 aa, Artificial Sequence
  Description of Artificial Sequence: Synthetic peptide
RASQNIGSDLA

SEQ ID NO: 1397 - protein, 7 aa, Artificial Sequence
  Description of Artificial Sequence: Synthetic peptide
RASFRAT

SEQ ID NO: 1398 - protein, 9 aa, Artificial Sequence
  Description of Artificial Sequence: Synthetic peptide
QQRGNWPPT

SEQ ID NO: 1399 - protein, 5 aa, Artificial Sequence
  Description of Artificial Sequence: Synthetic peptide
QYPMW

SEQ ID NO: 1400 - protein, 17 aa, Artificial Sequence
  Description of Artificial Sequence: Synthetic peptide
YIVPSGGRTYYADSVKG

SEQ ID NO: 1401 - protein, 15 aa, Artificial Sequence
  Description of Artificial Sequence: Synthetic peptide
DRAYGDYVGWNGFDY

SEQ ID NO: 1402 - protein, 11 aa, Artificial Sequence
  Description of Artificial Sequence: Synthetic peptide
RASQSISSFLA

SEQ ID NO: 1403 - protein, 7 aa, Artificial Sequence
  Description of Artificial Sequence: Synthetic peptide
DASYRAT

SEQ ID NO: 1404 - protein, 9 aa, Artificial Sequence
  Description of Artificial Sequence: Synthetic peptide
QQRGNWPIT

SEQ ID NO: 1405 - protein, 5 aa, Artificial Sequence
  Description of Artificial Sequence: Synthetic peptide
QYPMW

SEQ ID NO: 1406 - protein, 17 aa, Artificial Sequence
  Description of Artificial Sequence: Synthetic peptide
YIVPSGGRTYYADSVKG

SEQ ID NO: 1407 - protein, 15 aa, Artificial Sequence
  Description of Artificial Sequence: Synthetic peptide
DRAYGDYVGWNGFDY

SEQ ID NO: 1408 - protein, 11 aa, Artificial Sequence
  Description of Artificial Sequence: Synthetic peptide
RATQGIGTFLA

SEQ ID NO: 1409 - protein, 7 aa, Artificial Sequence
  Description of Artificial Sequence: Synthetic peptide
GASTLQS

SEQ ID NO: 1410 - protein, 9 aa, Artificial Sequence
  Description of Artificial Sequence: Synthetic peptide
QQRYTWPIT

SEQ ID NO: 1411 - protein, 5 aa, Artificial Sequence
  Description of Artificial Sequence: Synthetic peptide
QYPMW

SEQ ID NO: 1412 - protein, 17 aa, Artificial Sequence
  Description of Artificial Sequence: Synthetic peptide
YIVPSGGRTYYADSVKG

SEQ ID NO: 1413 - protein, 15 aa, Artificial Sequence
  Description of Artificial Sequence: Synthetic peptide
DRAYGDYVGWNGFDY

SEQ ID NO: 1414 - protein, 11 aa, Artificial Sequence
  Description of Artificial Sequence: Synthetic peptide
TASQSVGSHLA

SEQ ID NO: 1415 - protein, 7 aa, Artificial Sequence
  Description of Artificial Sequence: Synthetic peptide
DTSSRAT

SEQ ID NO: 1416 - protein, 9 aa, Artificial Sequence
  Description of Artificial Sequence: Synthetic peptide
QQRRSWPLT

SEQ ID NO: 1417 - protein, 5 aa, Artificial Sequence
  Description of Artificial Sequence: Synthetic peptide
QYPMW

SEQ ID NO: 1418 - protein, 17 aa, Artificial Sequence
  Description of Artificial Sequence: Synthetic peptide
YIVPSGGRTYYADSVKG

SEQ ID NO: 1419 - protein, 15 aa, Artificial Sequence
  Description of Artificial Sequence: Synthetic peptide
DRAYGDYVGWNGFDY

SEQ ID NO: 1420 - protein, 11 aa, Artificial Sequence
  Description of Artificial Sequence: Synthetic peptide
RASQSVSSDLA

SEQ ID NO: 1421 - protein, 7 aa, Artificial Sequence
  Description of Artificial Sequence: Synthetic peptide
GASTRAT

SEQ ID NO: 1422 - protein, 9 aa, Artificial Sequence
  Description of Artificial Sequence: Synthetic peptide
QQRAYWPVS

SEQ ID NO: 1423 - protein, 5 aa, Artificial Sequence
  Description of Artificial Sequence: Synthetic peptide
QYPMW

SEQ ID NO: 1424 - protein, 17 aa, Artificial Sequence
  Description of Artificial Sequence: Synthetic peptide
YIVPSGGRTYYADSVKG

SEQ ID NO: 1425 - protein, 15 aa, Artificial Sequence
  Description of Artificial Sequence: Synthetic peptide
DRAYGDYVGWNGFDY

SEQ ID NO: 1426 - protein, 11 aa, Artificial Sequence
  Description of Artificial Sequence: Synthetic peptide
RASQHIYTSLA

SEQ ID NO: 1427 - protein, 7 aa, Artificial Sequence
  Description of Artificial Sequence: Synthetic peptide
EASYRAT

SEQ ID NO: 1428 - protein, 9 aa, Artificial Sequence
  Description of Artificial Sequence: Synthetic peptide
QQRGSWPIT

SEQ ID NO: 1429 - protein, 5 aa, Artificial Sequence
  Description of Artificial Sequence: Synthetic peptide
QYPMW

SEQ ID NO: 1430 - protein, 17 aa, Artificial Sequence
  Description of Artificial Sequence: Synthetic peptide
YIVPSGGRTYYADSVKG

SEQ ID NO: 1431 - protein, 15 aa, Artificial Sequence
  Description of Artificial Sequence: Synthetic peptide
DRAYGDYVGWNGFDY

SEQ ID NO: 1432 - protein, 11 aa, Artificial Sequence
  Description of Artificial Sequence: Synthetic peptide
RASQSVSSYLA

SEQ ID NO: 1433 - protein, 7 aa, Artificial Sequence
  Description of Artificial Sequence: Synthetic peptide
GASTRAT

SEQ ID NO: 1434 - protein, 9 aa, Artificial Sequence
  Description of Artificial Sequence: Synthetic peptide
QQRGFWPIT

SEQ ID NO: 1435 - protein, 5 aa, Artificial Sequence
  Description of Artificial Sequence: Synthetic peptide
QYPMW

SEQ ID NO: 1436 - protein, 17 aa, Artificial Sequence
  Description of Artificial Sequence: Synthetic peptide
YIVPSGGRTYYADSVKG

SEQ ID NO: 1437 - protein, 15 aa, Artificial Sequence
  Description of Artificial Sequence: Synthetic peptide
DRAYGDYVGWNGFDY

SEQ ID NO: 1438 - protein, 11 aa, Artificial Sequence
  Description of Artificial Sequence: Synthetic peptide
RASQSVSSYLA

SEQ ID NO: 1439 - protein, 7 aa, Artificial Sequence
  Description of Artificial Sequence: Synthetic peptide
GASNRAT

SEQ ID NO: 1440 - protein, 9 aa, Artificial Sequence
  Description of Artificial Sequence: Synthetic peptide
QQRGNWPIT

SEQ ID NO: 1441 - protein, 5 aa, Artificial Sequence
  Description of Artificial Sequence: Synthetic peptide
QYPMW

SEQ ID NO: 1442 - protein, 17 aa, Artificial Sequence
  Description of Artificial Sequence: Synthetic peptide
YIVPSGGRTYYADSVKG

SEQ ID NO: 1443 - protein, 15 aa, Artificial Sequence
  Description of Artificial Sequence: Synthetic peptide
DRAYGDYVGWNGFDY

SEQ ID NO: 1444 - protein, 10 aa, Artificial Sequence
  Description of Artificial Sequence: Synthetic peptide
RASQSVSSVA

SEQ ID NO: 1445 - protein, 7 aa, Artificial Sequence
  Description of Artificial Sequence: Synthetic peptide
DTSNRAT

SEQ ID NO: 1446 - protein, 9 aa, Artificial Sequence
  Description of Artificial Sequence: Synthetic peptide
QQRTKWPIT

SEQ ID NO: 1447 - protein, 5 aa, Artificial Sequence
  Description of Artificial Sequence: Synthetic peptide
QYPMW

SEQ ID NO: 1448 - protein, 17 aa, Artificial Sequence
  Description of Artificial Sequence: Synthetic peptide
YIVPSGGRTYYADSVKG

SEQ ID NO: 1449 - protein, 15 aa, Artificial Sequence
  Description of Artificial Sequence: Synthetic peptide
DRAYGDYVGWNGFDY

SEQ ID NO: 1450 - protein, 11 aa, Artificial Sequence
  Description of Artificial Sequence: Synthetic peptide
RASESVGMYIA

SEQ ID NO: 1451 - protein, 7 aa, Artificial Sequence
  Description of Artificial Sequence: Synthetic peptide
GASNRAT

SEQ ID NO: 1452 - protein, 9 aa, Artificial Sequence
  Description of Artificial Sequence: Synthetic peptide
QQRGNWPIT

SEQ ID NO: 1453 - protein, 5 aa, Artificial Sequence
  Description of Artificial Sequence: Synthetic peptide
QYPMW

SEQ ID NO: 1454 - protein, 17 aa, Artificial Sequence
  Description of Artificial Sequence: Synthetic peptide
YIVPSGGRTYYADSVKG

SEQ ID NO: 1455 - protein, 15 aa, Artificial Sequence
  Description of Artificial Sequence: Synthetic peptide
DRAYGDYVGWNGFDY

SEQ ID NO: 1456 - protein, 12 aa, Artificial Sequence
  Description of Artificial Sequence: Synthetic peptide
GASQSVSSSYLA

SEQ ID NO: 1457 - protein, 7 aa, Artificial Sequence
  Description of Artificial Sequence: Synthetic peptide
DASSRAT

SEQ ID NO: 1458 - protein, 9 aa, Artificial Sequence
  Description of Artificial Sequence: Synthetic peptide
QQYGSSPWT

SEQ ID NO: 1459 - protein, 5 aa, Artificial Sequence
  Description of Artificial Sequence: Synthetic peptide
QYPMW

SEQ ID NO: 1460 - protein, 17 aa, Artificial Sequence
  Description of Artificial Sequence: Synthetic peptide
YIVPSGGRTYYADSVKG

SEQ ID NO: 1461 - protein, 15 aa, Artificial Sequence
  Description of Artificial Sequence: Synthetic peptide
DRAYGDYVGWNGFDY

SEQ ID NO: 1462 - protein, 11 aa, Artificial Sequence
  Description of Artificial Sequence: Synthetic peptide
RASPSISNFLA

SEQ ID NO: 1463 - protein, 7 aa, Artificial Sequence
  Description of Artificial Sequence: Synthetic peptide
GASNRAT

SEQ ID NO: 1464 - protein, 9 aa, Artificial Sequence
  Description of Artificial Sequence: Synthetic peptide
QQRRSWPPT

SEQ ID NO: 1465 - protein, 5 aa, Artificial Sequence
  Description of Artificial Sequence: Synthetic peptide
QYPMW

SEQ ID NO: 1466 - protein, 17 aa, Artificial Sequence
  Description of Artificial Sequence: Synthetic peptide
YIVPSGGRTYYADSVKG

SEQ ID NO: 1467 - protein, 15 aa, Artificial Sequence
  Description of Artificial Sequence: Synthetic peptide
DRAYGDYVGWNGFDY

SEQ ID NO: 1468 - protein, 11 aa, Artificial Sequence
  Description of Artificial Sequence: Synthetic peptide
RASQNIGGYLA

SEQ ID NO: 1469 - protein, 7 aa, Artificial Sequence
  Description of Artificial Sequence: Synthetic peptide
GASNRAT

SEQ ID NO: 1470 - protein, 9 aa, Artificial Sequence
  Description of Artificial Sequence: Synthetic peptide
QQRSNWPPT

SEQ ID NO: 1471 - protein, 5 aa, Artificial Sequence
  Description of Artificial Sequence: Synthetic peptide
QYPMW

SEQ ID NO: 1472 - protein, 17 aa, Artificial Sequence
  Description of Artificial Sequence: Synthetic peptide
YIVPSGGRTYYADSVKG

SEQ ID NO: 1473 - protein, 15 aa, Artificial Sequence
  Description of Artificial Sequence: Synthetic peptide
DRAYGDYVGWNGFDY

SEQ ID NO: 1474 - protein, 11 aa, Artificial Sequence
  Description of Artificial Sequence: Synthetic peptide
RASQNVANYLD

SEQ ID NO: 1475 - protein, 7 aa, Artificial Sequence
  Description of Artificial Sequence: Synthetic peptide
DGSNRAT

SEQ ID NO: 1476 - protein, 10 aa, Artificial Sequence
  Description of Artificial Sequence: Synthetic peptide
QQRHSWPPIT

SEQ ID NO: 1477 - protein, 5 aa, Artificial Sequence
  Description of Artificial Sequence: Synthetic peptide
QYPMW

SEQ ID NO: 1478 - protein, 17 aa, Artificial Sequence
  Description of Artificial Sequence: Synthetic peptide
YIVPSGGRTYYADSVKG

SEQ ID NO: 1479 - protein, 15 aa, Artificial Sequence
  Description of Artificial Sequence: Synthetic peptide
DRAYGDYVGWNGFDY

SEQ ID NO: 1480 - protein, 11 aa, Artificial Sequence
  Description of Artificial Sequence: Synthetic peptide
RASQNVHTYLA

SEQ ID NO: 1481 - protein, 7 aa, Artificial Sequence
  Description of Artificial Sequence: Synthetic peptide
EASNRAT

SEQ ID NO: 1482 - protein, 9 aa, Artificial Sequence
  Description of Artificial Sequence: Synthetic peptide
QQRGGWPIT

SEQ ID NO: 1483 - protein, 5 aa, Artificial Sequence
  Description of Artificial Sequence: Synthetic peptide
QYPMW

SEQ ID NO: 1484 - protein, 17 aa, Artificial Sequence
  Description of Artificial Sequence: Synthetic peptide
YIVPSGGRTYYADSVKG

SEQ ID NO: 1485 - protein, 15 aa, Artificial Sequence
  Description of Artificial Sequence: Synthetic peptide
DRAYGDYVGWNGFDY

SEQ ID NO: 1486 - protein, 11 aa, Artificial Sequence
  Description of Artificial Sequence: Synthetic peptide
RASQSIGNHLA

SEQ ID NO: 1487 - protein, 7 aa, Artificial Sequence
  Description of Artificial Sequence: Synthetic peptide
DASNRAT

SEQ ID NO: 1488 - protein, 9 aa, Artificial Sequence
  Description of Artificial Sequence: Synthetic peptide
QQRGNWPIT

SEQ ID NO: 1489 - protein, 5 aa, Artificial Sequence
  Description of Artificial Sequence: Synthetic peptide
QYPMW

SEQ ID NO: 1490 - protein, 17 aa, Artificial Sequence
  Description of Artificial Sequence: Synthetic peptide
YIVPSGGRTYYADSVKG

SEQ ID NO: 1491 - protein, 15 aa, Artificial Sequence
  Description of Artificial Sequence: Synthetic peptide
DRAYGDYVGWNGFDY

SEQ ID NO: 1492 - protein, 11 aa, Artificial Sequence
  Description of Artificial Sequence: Synthetic peptide
RASQSISSFLA

SEQ ID NO: 1493 - protein, 7 aa, Artificial Sequence
  Description of Artificial Sequence: Synthetic peptide
DASYRAT

SEQ ID NO: 1494 - protein, 9 aa, Artificial Sequence
  Description of Artificial Sequence: Synthetic peptide
QQRGNWPIT

SEQ ID NO: 1495 - protein, 5 aa, Artificial Sequence
  Description of Artificial Sequence: Synthetic peptide
QYPMW

SEQ ID NO: 1496 - protein, 17 aa, Artificial Sequence
  Description of Artificial Sequence: Synthetic peptide
YIVPSGGRTYYADSVKG

SEQ ID NO: 1497 - protein, 15 aa, Artificial Sequence
  Description of Artificial Sequence: Synthetic peptide
DRAYGDYVGWNGFDY

SEQ ID NO: 1498 - protein, 11 aa, Artificial Sequence
  Description of Artificial Sequence: Synthetic peptide
RASQSISSFLA

SEQ ID NO: 1499 - protein, 7 aa, Artificial Sequence
  Description of Artificial Sequence: Synthetic peptide
GASSRAR

SEQ ID NO: 1500 - protein, 9 aa, Artificial Sequence
  Description of Artificial Sequence: Synthetic peptide
QQRGNWPIT

SEQ ID NO: 1501 - protein, 5 aa, Artificial Sequence
  Description of Artificial Sequence: Synthetic peptide
QYPMW

SEQ ID NO: 1502 - protein, 17 aa, Artificial Sequence
  Description of Artificial Sequence: Synthetic peptide
YIVPSGGRTYYADSVKG

SEQ ID NO: 1503 - protein, 15 aa, Artificial Sequence
  Description of Artificial Sequence: Synthetic peptide
DRAYGDYVGWNGFDY

SEQ ID NO: 1504 - protein, 11 aa, Artificial Sequence
  Description of Artificial Sequence: Synthetic peptide
RASQSISSFLA

SEQ ID NO: 1505 - protein, 7 aa, Artificial Sequence
  Description of Artificial Sequence: Synthetic peptide
GASTRAT

SEQ ID NO: 1506 - protein, 9 aa, Artificial Sequence
  Description of Artificial Sequence: Synthetic peptide
QQRGNWPIT

SEQ ID NO: 1507 - protein, 5 aa, Artificial Sequence
  Description of Artificial Sequence: Synthetic peptide
QYPMW

SEQ ID NO: 1508 - protein, 17 aa, Artificial Sequence
  Description of Artificial Sequence: Synthetic peptide
YIVPSGGRTYYADSVKG

SEQ ID NO: 1509 - protein, 15 aa, Artificial Sequence
  Description of Artificial Sequence: Synthetic peptide
DRAYGDYVGWNGFDY

SEQ ID NO: 1510 - protein, 11 aa, Artificial Sequence
  Description of Artificial Sequence: Synthetic peptide
RASQSISSHLA

SEQ ID NO: 1511 - protein, 7 aa, Artificial Sequence
  Description of Artificial Sequence: Synthetic peptide
GASSRAT

SEQ ID NO: 1512 - protein, 9 aa, Artificial Sequence
  Description of Artificial Sequence: Synthetic peptide
QQRGNWPIT

SEQ ID NO: 1513 - protein, 5 aa, Artificial Sequence
  Description of Artificial Sequence: Synthetic peptide
QYPMW

SEQ ID NO: 1514 - protein, 17 aa, Artificial Sequence
  Description of Artificial Sequence: Synthetic peptide
YIVPSGGRTYYADSVKG

SEQ ID NO: 1515 - protein, 15 aa, Artificial Sequence
  Description of Artificial Sequence: Synthetic peptide
DRAYGDYVGWNGFDY

SEQ ID NO: 1516 - protein, 11 aa, Artificial Sequence
  Description of Artificial Sequence: Synthetic peptide
RASQSISTSLA

SEQ ID NO: 1517 - protein, 6 aa, Artificial Sequence
  Description of Artificial Sequence: Synthetic peptide
DASNRA

SEQ ID NO: 1518 - protein, 9 aa, Artificial Sequence
  Description of Artificial Sequence: Synthetic peptide
QQRGAWPLT

SEQ ID NO: 1519 - protein, 5 aa, Artificial Sequence
  Description of Artificial Sequence: Synthetic peptide
QYPMW

SEQ ID NO: 1520 - protein, 17 aa, Artificial Sequence
  Description of Artificial Sequence: Synthetic peptide
YIVPSGGRTYYADSVKG

SEQ ID NO: 1521 - protein, 15 aa, Artificial Sequence
  Description of Artificial Sequence: Synthetic peptide
DRAYGDYVGWNGFDY

SEQ ID NO: 1522 - protein, 12 aa, Artificial Sequence
  Description of Artificial Sequence: Synthetic peptide
RASQSLGRSDLA

SEQ ID NO: 1523 - protein, 7 aa, Artificial Sequence
  Description of Artificial Sequence: Synthetic peptide
GVSNRVT

SEQ ID NO: 1524 - protein, 9 aa, Artificial Sequence
  Description of Artificial Sequence: Synthetic peptide
QQRSNWPPT

SEQ ID NO: 1525 - protein, 5 aa, Artificial Sequence
  Description of Artificial Sequence: Synthetic peptide
QYPMW

SEQ ID NO: 1526 - protein, 17 aa, Artificial Sequence
  Description of Artificial Sequence: Synthetic peptide
YIVPSGGRTYYADSVKG

SEQ ID NO: 1527 - protein, 15 aa, Artificial Sequence
  Description of Artificial Sequence: Synthetic peptide
DRAYGDYVGWNGFDY

SEQ ID NO: 1528 - protein, 12 aa, Artificial Sequence
  Description of Artificial Sequence: Synthetic peptide
RASQSLGRSDLA

SEQ ID NO: 1529 - protein, 7 aa, Artificial Sequence
  Description of Artificial Sequence: Synthetic peptide
GVSNRVT

SEQ ID NO: 1530 - protein, 9 aa, Artificial Sequence
  Description of Artificial Sequence: Synthetic peptide
QQRSTWPIT

SEQ ID NO: 1531 - protein, 5 aa, Artificial Sequence
  Description of Artificial Sequence: Synthetic peptide
QYPMW

SEQ ID NO: 1532 - protein, 17 aa, Artificial Sequence
  Description of Artificial Sequence: Synthetic peptide
YIVPSGGRTYYADSVKG

SEQ ID NO: 1533 - protein, 15 aa, Artificial Sequence
  Description of Artificial Sequence: Synthetic peptide
DRAYGDYVGWNGFDY

SEQ ID NO: 1534 - protein, 11 aa, Artificial Sequence
  Description of Artificial Sequence: Synthetic peptide
RASQSLGSFLA

SEQ ID NO: 1535 - protein, 7 aa, Artificial Sequence
  Description of Artificial Sequence: Synthetic peptide
GASYRAT

SEQ ID NO: 1536 - protein, 9 aa, Artificial Sequence
  Description of Artificial Sequence: Synthetic peptide
QQRGNWPIT

SEQ ID NO: 1537 - protein, 5 aa, Artificial Sequence
  Description of Artificial Sequence: Synthetic peptide
QYPMW

SEQ ID NO: 1538 - protein, 17 aa, Artificial Sequence
  Description of Artificial Sequence: Synthetic peptide
YIVPSGGRTYYADSVKG

SEQ ID NO: 1539 - protein, 15 aa, Artificial Sequence
  Description of Artificial Sequence: Synthetic peptide
DRAYGDYVGWNGFDY

SEQ ID NO: 1540 - protein, 11 aa, Artificial Sequence
  Description of Artificial Sequence: Synthetic peptide
RASQSVDSYLA

SEQ ID NO: 1541 - protein, 7 aa, Artificial Sequence
  Description of Artificial Sequence: Synthetic peptide
DASNRAT

SEQ ID NO: 1542 - protein, 9 aa, Artificial Sequence
  Description of Artificial Sequence: Synthetic peptide
QHRRSWPLT

SEQ ID NO: 1543 - protein, 5 aa, Artificial Sequence
  Description of Artificial Sequence: Synthetic peptide
QYPMW

SEQ ID NO: 1544 - protein, 17 aa, Artificial Sequence
  Description of Artificial Sequence: Synthetic peptide
YIVPSGGRTYYADSVKG

SEQ ID NO: 1545 - protein, 15 aa, Artificial Sequence
  Description of Artificial Sequence: Synthetic peptide
DRAYGDYVGWNGFDY

SEQ ID NO: 1546 - protein, 11 aa, Artificial Sequence
  Description of Artificial Sequence: Synthetic peptide
RASQSVDSYLA

SEQ ID NO: 1547 - protein, 7 aa, Artificial Sequence
  Description of Artificial Sequence: Synthetic peptide
GASNRAT

SEQ ID NO: 1548 - protein, 9 aa, Artificial Sequence
  Description of Artificial Sequence: Synthetic peptide
QQRRKWPVT

SEQ ID NO: 1549 - protein, 5 aa, Artificial Sequence
  Description of Artificial Sequence: Synthetic peptide
QYPMW

SEQ ID NO: 1550 - protein, 17 aa, Artificial Sequence
  Description of Artificial Sequence: Synthetic peptide
YIVPSGGRTYYADSVKG

SEQ ID NO: 1551 - protein, 15 aa, Artificial Sequence
  Description of Artificial Sequence: Synthetic peptide
DRAYGDYVGWNGFDY

SEQ ID NO: 1552 - protein, 11 aa, Artificial Sequence
  Description of Artificial Sequence: Synthetic peptide
RASQSVGGDIA

SEQ ID NO: 1553 - protein, 7 aa, Artificial Sequence
  Description of Artificial Sequence: Synthetic peptide
GASNRAT

SEQ ID NO: 1554 - protein, 9 aa, Artificial Sequence
  Description of Artificial Sequence: Synthetic peptide
QQRSYWPVT

SEQ ID NO: 1555 - protein, 5 aa, Artificial Sequence
  Description of Artificial Sequence: Synthetic peptide
QYPMW

SEQ ID NO: 1556 - protein, 17 aa, Artificial Sequence
  Description of Artificial Sequence: Synthetic peptide
YIVPSGGRTYYADSVKG

SEQ ID NO: 1557 - protein, 15 aa, Artificial Sequence
  Description of Artificial Sequence: Synthetic peptide
DRAYGDYVGWNGFDY

SEQ ID NO: 1558 - protein, 11 aa, Artificial Sequence
  Description of Artificial Sequence: Synthetic peptide
RASQSVGRDLA

SEQ ID NO: 1559 - protein, 7 aa, Artificial Sequence
  Description of Artificial Sequence: Synthetic peptide
GATTRAT

SEQ ID NO: 1560 - protein, 9 aa, Artificial Sequence
  Description of Artificial Sequence: Synthetic peptide
QQRGNWPIT

SEQ ID NO: 1561 - protein, 5 aa, Artificial Sequence
  Description of Artificial Sequence: Synthetic peptide
QYPMW

SEQ ID NO: 1562 - protein, 17 aa, Artificial Sequence
  Description of Artificial Sequence: Synthetic peptide
YIVPSGGRTYYADSVKG

SEQ ID NO: 1563 - protein, 15 aa, Artificial Sequence
  Description of Artificial Sequence: Synthetic peptide
DRAYGDYVGWNGFDY

SEQ ID NO: 1564 - protein, 11 aa, Artificial Sequence
  Description of Artificial Sequence: Synthetic peptide
RASQSVGSDLA

SEQ ID NO: 1565 - protein, 7 aa, Artificial Sequence
  Description of Artificial Sequence: Synthetic peptide
GASTRAT

SEQ ID NO: 1566 - protein, 9 aa, Artificial Sequence
  Description of Artificial Sequence: Synthetic peptide
QQRGNWPIT

SEQ ID NO: 1567 - protein, 5 aa, Artificial Sequence
  Description of Artificial Sequence: Synthetic peptide
QYPMW

SEQ ID NO: 1568 - protein, 17 aa, Artificial Sequence
  Description of Artificial Sequence: Synthetic peptide
YIVPSGGRTYYADSVKG

SEQ ID NO: 1569 - protein, 15 aa, Artificial Sequence
  Description of Artificial Sequence: Synthetic peptide
DRAYGDYVGWNGFDY

SEQ ID NO: 1570 - protein, 11 aa, Artificial Sequence
  Description of Artificial Sequence: Synthetic peptide
RASQSVGSFLA

SEQ ID NO: 1571 - protein, 7 aa, Artificial Sequence
  Description of Artificial Sequence: Synthetic peptide
GASNRAT

SEQ ID NO: 1572 - protein, 9 aa, Artificial Sequence
  Description of Artificial Sequence: Synthetic peptide
QQRGNWPIT

SEQ ID NO: 1573 - protein, 5 aa, Artificial Sequence
  Description of Artificial Sequence: Synthetic peptide
QYPMW

SEQ ID NO: 1574 - protein, 17 aa, Artificial Sequence
  Description of Artificial Sequence: Synthetic peptide
YIVPSGGRTYYADSVKG

SEQ ID NO: 1575 - protein, 15 aa, Artificial Sequence
  Description of Artificial Sequence: Synthetic peptide
DRAYGDYVGWNGFDY

SEQ ID NO: 1576 - protein, 11 aa, Artificial Sequence
  Description of Artificial Sequence: Synthetic peptide
RASQSVGSQLA

SEQ ID NO: 1577 - protein, 7 aa, Artificial Sequence
  Description of Artificial Sequence: Synthetic peptide
DASYRAT

SEQ ID NO: 1578 - protein, 9 aa, Artificial Sequence
  Description of Artificial Sequence: Synthetic peptide
QQRGNWPIT

SEQ ID NO: 1579 - protein, 5 aa, Artificial Sequence
  Description of Artificial Sequence: Synthetic peptide
QYPMW

SEQ ID NO: 1580 - protein, 17 aa, Artificial Sequence
  Description of Artificial Sequence: Synthetic peptide
YIVPSGGRTYYADSVKG

SEQ ID NO: 1581 - protein, 15 aa, Artificial Sequence
  Description of Artificial Sequence: Synthetic peptide
DRAYGDYVGWNGFDY

SEQ ID NO: 1582 - protein, 11 aa, Artificial Sequence
  Description of Artificial Sequence: Synthetic peptide
RASQSVGTHLA

SEQ ID NO: 1583 - protein, 7 aa, Artificial Sequence
  Description of Artificial Sequence: Synthetic peptide
GASTRAT

SEQ ID NO: 1584 - protein, 9 aa, Artificial Sequence
  Description of Artificial Sequence: Synthetic peptide
QQRRSWPIT

SEQ ID NO: 1585 - protein, 5 aa, Artificial Sequence
  Description of Artificial Sequence: Synthetic peptide
QYPMW

SEQ ID NO: 1586 - protein, 17 aa, Artificial Sequence
  Description of Artificial Sequence: Synthetic peptide
YIVPSGGRTYYADSVKG

SEQ ID NO: 1587 - protein, 15 aa, Artificial Sequence
  Description of Artificial Sequence: Synthetic peptide
DRAYGDYVGWNGFDY

SEQ ID NO: 1588 - protein, 11 aa, Artificial Sequence
  Description of Artificial Sequence: Synthetic peptide
RASQSVNHFLA

SEQ ID NO: 1589 - protein, 7 aa, Artificial Sequence
  Description of Artificial Sequence: Synthetic peptide
GASNRAT

SEQ ID NO: 1590 - protein, 9 aa, Artificial Sequence
  Description of Artificial Sequence: Synthetic peptide
QQRGSWPIT

SEQ ID NO: 1591 - protein, 5 aa, Artificial Sequence
  Description of Artificial Sequence: Synthetic peptide
QYPMW

SEQ ID NO: 1592 - protein, 17 aa, Artificial Sequence
  Description of Artificial Sequence: Synthetic peptide
YIVPSGGRTYYADSVKG

SEQ ID NO: 1593 - protein, 15 aa, Artificial Sequence
  Description of Artificial Sequence: Synthetic peptide
DRAYGDYVGWNGFDY

SEQ ID NO: 1594 - protein, 11 aa, Artificial Sequence
  Description of Artificial Sequence: Synthetic peptide
RASQSVNSFLA

SEQ ID NO: 1595 - protein, 7 aa, Artificial Sequence
  Description of Artificial Sequence: Synthetic peptide
DASNRAT

SEQ ID NO: 1596 - protein, 9 aa, Artificial Sequence
  Description of Artificial Sequence: Synthetic peptide
QQRSNWPIT

SEQ ID NO: 1597 - protein, 5 aa, Artificial Sequence
  Description of Artificial Sequence: Synthetic peptide
QYPMW

SEQ ID NO: 1598 - protein, 17 aa, Artificial Sequence
  Description of Artificial Sequence: Synthetic peptide
YIVPSGGRTYYADSVKG

SEQ ID NO: 1599 - protein, 15 aa, Artificial Sequence
  Description of Artificial Sequence: Synthetic peptide
DRAYGDYVGWNGFDY

SEQ ID NO: 1600 - protein, 11 aa, Artificial Sequence
  Description of Artificial Sequence: Synthetic peptide
RASQSVNSYLA

SEQ ID NO: 1601 - protein, 7 aa, Artificial Sequence
  Description of Artificial Sequence: Synthetic peptide
DASNRAT

SEQ ID NO: 1602 - protein, 9 aa, Artificial Sequence
  Description of Artificial Sequence: Synthetic peptide
QQRGYWPPS

SEQ ID NO: 1603 - protein, 5 aa, Artificial Sequence
  Description of Artificial Sequence: Synthetic peptide
QYPMW

SEQ ID NO: 1604 - protein, 17 aa, Artificial Sequence
  Description of Artificial Sequence: Synthetic peptide
YIVPSGGRTYYADSVKG

SEQ ID NO: 1605 - protein, 15 aa, Artificial Sequence
  Description of Artificial Sequence: Synthetic peptide
DRAYGDYVGWNGFDY

SEQ ID NO: 1606 - protein, 11 aa, Artificial Sequence
  Description of Artificial Sequence: Synthetic peptide
RASQSVSNFLA

SEQ ID NO: 1607 - protein, 7 aa, Artificial Sequence
  Description of Artificial Sequence: Synthetic peptide
GASSRAT

SEQ ID NO: 1608 - protein, 9 aa, Artificial Sequence
  Description of Artificial Sequence: Synthetic peptide
QQRGNWPIT

SEQ ID NO: 1609 - protein, 5 aa, Artificial Sequence
  Description of Artificial Sequence: Synthetic peptide
QYPMW

SEQ ID NO: 1610 - protein, 17 aa, Artificial Sequence
  Description of Artificial Sequence: Synthetic peptide
YIVPSGGRTYYADSVKG

SEQ ID NO: 1611 - protein, 15 aa, Artificial Sequence
  Description of Artificial Sequence: Synthetic peptide
DRAYGDYVGWNGFDY

SEQ ID NO: 1612 - protein, 11 aa, Artificial Sequence
  Description of Artificial Sequence: Synthetic peptide
RASQSVSNYLA

SEQ ID NO: 1613 - protein, 7 aa, Artificial Sequence
  Description of Artificial Sequence: Synthetic peptide
GASTRAT

SEQ ID NO: 1614 - protein, 9 aa, Artificial Sequence
  Description of Artificial Sequence: Synthetic peptide
QQRGNWPIT

SEQ ID NO: 1615 - protein, 5 aa, Artificial Sequence
  Description of Artificial Sequence: Synthetic peptide
QYPMW

SEQ ID NO: 1616 - protein, 17 aa, Artificial Sequence
  Description of Artificial Sequence: Synthetic peptide
YIVPSGGRTYYADSVKG

SEQ ID NO: 1617 - protein, 15 aa, Artificial Sequence
  Description of Artificial Sequence: Synthetic peptide
DRAYGDYVGWNGFDY

SEQ ID NO: 1618 - protein, 11 aa, Artificial Sequence
  Description of Artificial Sequence: Synthetic peptide
RASQSVSRYLA

SEQ ID NO: 1619 - protein, 7 aa, Artificial Sequence
  Description of Artificial Sequence: Synthetic peptide
DASSRAT

SEQ ID NO: 1620 - protein, 9 aa, Artificial Sequence
  Description of Artificial Sequence: Synthetic peptide
HQRSSWPIT

SEQ ID NO: 1621 - protein, 5 aa, Artificial Sequence
  Description of Artificial Sequence: Synthetic peptide
QYPMW

SEQ ID NO: 1622 - protein, 17 aa, Artificial Sequence
  Description of Artificial Sequence: Synthetic peptide
YIVPSGGRTYYADSVKG

SEQ ID NO: 1623 - protein, 15 aa, Artificial Sequence
  Description of Artificial Sequence: Synthetic peptide
DRAYGDYVGWNGFDY

SEQ ID NO: 1624 - protein, 11 aa, Artificial Sequence
  Description of Artificial Sequence: Synthetic peptide
RASQSVSRYLA

SEQ ID NO: 1625 - protein, 7 aa, Artificial Sequence
  Description of Artificial Sequence: Synthetic peptide
DASNRAT

SEQ ID NO: 1626 - protein, 9 aa, Artificial Sequence
  Description of Artificial Sequence: Synthetic peptide
QQRINWPLT

SEQ ID NO: 1627 - protein, 5 aa, Artificial Sequence
  Description of Artificial Sequence: Synthetic peptide
QYPMW

SEQ ID NO: 1628 - protein, 17 aa, Artificial Sequence
  Description of Artificial Sequence: Synthetic peptide
YIVPSGGRTYYADSVKG

SEQ ID NO: 1629 - protein, 15 aa, Artificial Sequence
  Description of Artificial Sequence: Synthetic peptide
DRAYGDYVGWNGFDY

SEQ ID NO: 1630 - protein, 11 aa, Artificial Sequence
  Description of Artificial Sequence: Synthetic peptide
RASQSVSSFLA

SEQ ID NO: 1631 - protein, 7 aa, Artificial Sequence
  Description of Artificial Sequence: Synthetic peptide
HASNRAT

SEQ ID NO: 1632 - protein, 9 aa, Artificial Sequence
  Description of Artificial Sequence: Synthetic peptide
QQRGNWPIT

SEQ ID NO: 1633 - protein, 5 aa, Artificial Sequence
  Description of Artificial Sequence: Synthetic peptide
QYPMW

SEQ ID NO: 1634 - protein, 17 aa, Artificial Sequence
  Description of Artificial Sequence: Synthetic peptide
YIVPSGGRTYYADSVKG

SEQ ID NO: 1635 - protein, 15 aa, Artificial Sequence
  Description of Artificial Sequence: Synthetic peptide
DRAYGDYVGWNGFDY

SEQ ID NO: 1636 - protein, 11 aa, Artificial Sequence
  Description of Artificial Sequence: Synthetic peptide
RASQSVSSFLA

SEQ ID NO: 1637 - protein, 7 aa, Artificial Sequence
  Description of Artificial Sequence: Synthetic peptide
DASNRAS

SEQ ID NO: 1638 - protein, 9 aa, Artificial Sequence
  Description of Artificial Sequence: Synthetic peptide
QQRANWPLT

SEQ ID NO: 1639 - protein, 5 aa, Artificial Sequence
  Description of Artificial Sequence: Synthetic peptide
QYPMW

SEQ ID NO: 1640 - protein, 17 aa, Artificial Sequence
  Description of Artificial Sequence: Synthetic peptide
YIVPSGGRTYYADSVKG

SEQ ID NO: 1641 - protein, 15 aa, Artificial Sequence
  Description of Artificial Sequence: Synthetic peptide
DRAYGDYVGWNGFDY

SEQ ID NO: 1642 - protein, 11 aa, Artificial Sequence
  Description of Artificial Sequence: Synthetic peptide
RASQSVSSHLA

SEQ ID NO: 1643 - protein, 7 aa, Artificial Sequence
  Description of Artificial Sequence: Synthetic peptide
GASSRAT

SEQ ID NO: 1644 - protein, 9 aa, Artificial Sequence
  Description of Artificial Sequence: Synthetic peptide
QQRGNWPIT

SEQ ID NO: 1645 - protein, 5 aa, Artificial Sequence
  Description of Artificial Sequence: Synthetic peptide
QYPMW

SEQ ID NO: 1646 - protein, 17 aa, Artificial Sequence
  Description of Artificial Sequence: Synthetic peptide
YIVPSGGRTYYADSVKG

SEQ ID NO: 1647 - protein, 15 aa, Artificial Sequence
  Description of Artificial Sequence: Synthetic peptide
DRAYGDYVGWNGFDY

SEQ ID NO: 1648 - protein, 11 aa, Artificial Sequence
  Description of Artificial Sequence: Synthetic peptide
RASQSVSSYLA

SEQ ID NO: 1649 - protein, 7 aa, Artificial Sequence
  Description of Artificial Sequence: Synthetic peptide
DASNRAT

SEQ ID NO: 1650 - protein, 9 aa, Artificial Sequence
  Description of Artificial Sequence: Synthetic peptide
QQRGNWPIT

SEQ ID NO: 1651 - protein, 5 aa, Artificial Sequence
  Description of Artificial Sequence: Synthetic peptide
QYPMW

SEQ ID NO: 1652 - protein, 17 aa, Artificial Sequence
  Description of Artificial Sequence: Synthetic peptide
YIVPSGGRTYYADSVKG

SEQ ID NO: 1653 - protein, 15 aa, Artificial Sequence
  Description of Artificial Sequence: Synthetic peptide
DRAYGDYVGWNGFDY

SEQ ID NO: 1654 - protein, 11 aa, Artificial Sequence
  Description of Artificial Sequence: Synthetic peptide
RASQSVSSYLA

SEQ ID NO: 1655 - protein, 7 aa, Artificial Sequence
  Description of Artificial Sequence: Synthetic peptide
GASNRAT

SEQ ID NO: 1656 - protein, 9 aa, Artificial Sequence
  Description of Artificial Sequence: Synthetic peptide
QQRGNWPIT

SEQ ID NO: 1657 - protein, 5 aa, Artificial Sequence
  Description of Artificial Sequence: Synthetic peptide
QYPMW

SEQ ID NO: 1658 - protein, 17 aa, Artificial Sequence
  Description of Artificial Sequence: Synthetic peptide
YIVPSGGRTYYADSVKG

SEQ ID NO: 1659 - protein, 15 aa, Artificial Sequence
  Description of Artificial Sequence: Synthetic peptide
DRAYGDYVGWNGFDY

SEQ ID NO: 1660 - protein, 11 aa, Artificial Sequence
  Description of Artificial Sequence: Synthetic peptide
RASQSVSSYLA

SEQ ID NO: 1661 - protein, 7 aa, Artificial Sequence
  Description of Artificial Sequence: Synthetic peptide
GASHRAT

SEQ ID NO: 1662 - protein, 9 aa, Artificial Sequence
  Description of Artificial Sequence: Synthetic peptide
QQRSNWPIT

SEQ ID NO: 1663 - protein, 5 aa, Artificial Sequence
  Description of Artificial Sequence: Synthetic peptide
QYPMW

SEQ ID NO: 1664 - protein, 17 aa, Artificial Sequence
  Description of Artificial Sequence: Synthetic peptide
YIVPSGGRTYYADSVKG

SEQ ID NO: 1665 - protein, 15 aa, Artificial Sequence
  Description of Artificial Sequence: Synthetic peptide
DRAYGDYVGWNGFDY

SEQ ID NO: 1666 - protein, 11 aa, Artificial Sequence
  Description of Artificial Sequence: Synthetic peptide
RASQSVSSYLA

SEQ ID NO: 1667 - protein, 7 aa, Artificial Sequence
  Description of Artificial Sequence: Synthetic peptide
DASNRAT

SEQ ID NO: 1668 - protein, 9 aa, Artificial Sequence
  Description of Artificial Sequence: Synthetic peptide
QQRGNWPIT

SEQ ID NO: 1669 - protein, 5 aa, Artificial Sequence
  Description of Artificial Sequence: Synthetic peptide
QYPMW

SEQ ID NO: 1670 - protein, 17 aa, Artificial Sequence
  Description of Artificial Sequence: Synthetic peptide
YIVPSGGRTYYADSVKG

SEQ ID NO: 1671 - protein, 15 aa, Artificial Sequence
  Description of Artificial Sequence: Synthetic peptide
DRAYGDYVGWNGFDY

SEQ ID NO: 1672 - protein, 11 aa, Artificial Sequence
  Description of Artificial Sequence: Synthetic peptide
RASQSVSSYLA

SEQ ID NO: 1673 - protein, 7 aa, Artificial Sequence
  Description of Artificial Sequence: Synthetic peptide
DASNRAT

SEQ ID NO: 1674 - protein, 9 aa, Artificial Sequence
  Description of Artificial Sequence: Synthetic peptide
QQRSNWPTT

SEQ ID NO: 1675 - protein, 5 aa, Artificial Sequence
  Description of Artificial Sequence: Synthetic peptide
QYPMW

SEQ ID NO: 1676 - protein, 17 aa, Artificial Sequence
  Description of Artificial Sequence: Synthetic peptide
YIVPSGGRTYYADSVKG

SEQ ID NO: 1677 - protein, 15 aa, Artificial Sequence
  Description of Artificial Sequence: Synthetic peptide
DRAYGDYVGWNGFDY

SEQ ID NO: 1678 - protein, 11 aa, Artificial Sequence
  Description of Artificial Sequence: Synthetic peptide
RASQSVSSYLA

SEQ ID NO: 1679 - protein, 7 aa, Artificial Sequence
  Description of Artificial Sequence: Synthetic peptide
DASNRAT

SEQ ID NO: 1680 - protein, 9 aa, Artificial Sequence
  Description of Artificial Sequence: Synthetic peptide
QQRGNWPIT

SEQ ID NO: 1681 - protein, 5 aa, Artificial Sequence
  Description of Artificial Sequence: Synthetic peptide
QYPMW

SEQ ID NO: 1682 - protein, 17 aa, Artificial Sequence
  Description of Artificial Sequence: Synthetic peptide
YIVPSGGRTYYADSVKG

SEQ ID NO: 1683 - protein, 15 aa, Artificial Sequence
  Description of Artificial Sequence: Synthetic peptide
DRAYGDYVGWNGFDY

SEQ ID NO: 1684 - protein, 11 aa, Artificial Sequence
  Description of Artificial Sequence: Synthetic peptide
RASQSVSSYLA

SEQ ID NO: 1685 - protein, 7 aa, Artificial Sequence
  Description of Artificial Sequence: Synthetic peptide
GASNRAT

SEQ ID NO: 1686 - protein, 9 aa, Artificial Sequence
  Description of Artificial Sequence: Synthetic peptide
QQRSNWPIT

SEQ ID NO: 1687 - protein, 5 aa, Artificial Sequence
  Description of Artificial Sequence: Synthetic peptide
QYPMW

SEQ ID NO: 1688 - protein, 17 aa, Artificial Sequence
  Description of Artificial Sequence: Synthetic peptide
YIVPSGGRTYYADSVKG

SEQ ID NO: 1689 - protein, 15 aa, Artificial Sequence
  Description of Artificial Sequence: Synthetic peptide
DRAYGDYVGWNGFDY

SEQ ID NO: 1690 - protein, 11 aa, Artificial Sequence
  Description of Artificial Sequence: Synthetic peptide
RASQSVSSYLA

SEQ ID NO: 1691 - protein, 7 aa, Artificial Sequence
  Description of Artificial Sequence: Synthetic peptide
GASSRAT

SEQ ID NO: 1692 - protein, 9 aa, Artificial Sequence
  Description of Artificial Sequence: Synthetic peptide
QQRSNWPVT

SEQ ID NO: 1693 - protein, 5 aa, Artificial Sequence
  Description of Artificial Sequence: Synthetic peptide
QYPMW

SEQ ID NO: 1694 - protein, 17 aa, Artificial Sequence
  Description of Artificial Sequence: Synthetic peptide
YIVPSGGRTYYADSVKG

SEQ ID NO: 1695 - protein, 15 aa, Artificial Sequence
  Description of Artificial Sequence: Synthetic peptide
DRAYGDYVGWNGFDY

SEQ ID NO: 1696 - protein, 11 aa, Artificial Sequence
  Description of Artificial Sequence: Synthetic peptide
RASQSVSSYLA

SEQ ID NO: 1697 - protein, 7 aa, Artificial Sequence
  Description of Artificial Sequence: Synthetic peptide
GASTRAT

SEQ ID NO: 1698 - protein, 9 aa, Artificial Sequence
  Description of Artificial Sequence: Synthetic peptide
QQRGNWPIT

SEQ ID NO: 1699 - protein, 5 aa, Artificial Sequence
  Description of Artificial Sequence: Synthetic peptide
QYPMW

SEQ ID NO: 1700 - protein, 17 aa, Artificial Sequence
  Description of Artificial Sequence: Synthetic peptide
YIVPSGGRTYYADSVKG

SEQ ID NO: 1701 - protein, 15 aa, Artificial Sequence
  Description of Artificial Sequence: Synthetic peptide
DRAYGDYVGWNGFDY

SEQ ID NO: 1702 - protein, 11 aa, Artificial Sequence
  Description of Artificial Sequence: Synthetic peptide
RASQSVSSYLA

SEQ ID NO: 1703 - protein, 7 aa, Artificial Sequence
  Description of Artificial Sequence: Synthetic peptide
GASNRAT

SEQ ID NO: 1704 - protein, 9 aa, Artificial Sequence
  Description of Artificial Sequence: Synthetic peptide
QQRGNWPPT

SEQ ID NO: 1705 - protein, 5 aa, Artificial Sequence
  Description of Artificial Sequence: Synthetic peptide
QYPMW

SEQ ID NO: 1706 - protein, 17 aa, Artificial Sequence
  Description of Artificial Sequence: Synthetic peptide
YIVPSGGRTYYADSVKG

SEQ ID NO: 1707 - protein, 15 aa, Artificial Sequence
  Description of Artificial Sequence: Synthetic peptide
DRAYGDYVGWNGFDY

SEQ ID NO: 1708 - protein, 11 aa, Artificial Sequence
  Description of Artificial Sequence: Synthetic peptide
RASQSVSSYLA

SEQ ID NO: 1709 - protein, 7 aa, Artificial Sequence
  Description of Artificial Sequence: Synthetic peptide
GASNRAT

SEQ ID NO: 1710 - protein, 9 aa, Artificial Sequence
  Description of Artificial Sequence: Synthetic peptide
EQRRSWPLT

SEQ ID NO: 1711 - protein, 5 aa, Artificial Sequence
  Description of Artificial Sequence: Synthetic peptide
QYPMW

SEQ ID NO: 1712 - protein, 17 aa, Artificial Sequence
  Description of Artificial Sequence: Synthetic peptide
YIVPSGGRTYYADSVKG

SEQ ID NO: 1713 - protein, 15 aa, Artificial Sequence
  Description of Artificial Sequence: Synthetic peptide
DRAYGDYVGWNGFDY

SEQ ID NO: 1714 - protein, 11 aa, Artificial Sequence
  Description of Artificial Sequence: Synthetic peptide
RASRSVGTHLA

SEQ ID NO: 1715 - protein, 7 aa, Artificial Sequence
  Description of Artificial Sequence: Synthetic peptide
DASVRAA

SEQ ID NO: 1716 - protein, 9 aa, Artificial Sequence
  Description of Artificial Sequence: Synthetic peptide
QQRGGWPIT

SEQ ID NO: 1717 - protein, 5 aa, Artificial Sequence
  Description of Artificial Sequence: Synthetic peptide
QYPMW

SEQ ID NO: 1718 - protein, 17 aa, Artificial Sequence
  Description of Artificial Sequence: Synthetic peptide
YIVPSGGRTYYADSVKG

SEQ ID NO: 1719 - protein, 15 aa, Artificial Sequence
  Description of Artificial Sequence: Synthetic peptide
DRAYGDYVGWNGFDY

SEQ ID NO: 1720 - protein, 11 aa, Artificial Sequence
  Description of Artificial Sequence: Synthetic peptide
RASRSVGTHLA

SEQ ID NO: 1721 - protein, 7 aa, Artificial Sequence
  Description of Artificial Sequence: Synthetic peptide
DASVRAA

SEQ ID NO: 1722 - protein, 9 aa, Artificial Sequence
  Description of Artificial Sequence: Synthetic peptide
QQRGNWPIT

SEQ ID NO: 1723 - protein, 5 aa, Artificial Sequence
  Description of Artificial Sequence: Synthetic peptide
QYPMW

SEQ ID NO: 1724 - protein, 17 aa, Artificial Sequence
  Description of Artificial Sequence: Synthetic peptide
YIVPSGGRTYYADSVKG

SEQ ID NO: 1725 - protein, 15 aa, Artificial Sequence
  Description of Artificial Sequence: Synthetic peptide
DRAYGDYVGWNGFDY

SEQ ID NO: 1726 - protein, 11 aa, Artificial Sequence
  Description of Artificial Sequence: Synthetic peptide
RTSQSVSRYLA

SEQ ID NO: 1727 - protein, 7 aa, Artificial Sequence
  Description of Artificial Sequence: Synthetic peptide
GTSNRAT

SEQ ID NO: 1728 - protein, 9 aa, Artificial Sequence
  Description of Artificial Sequence: Synthetic peptide
QQRYNWPIT

SEQ ID NO: 1729 - protein, 5 aa, Artificial Sequence
  Description of Artificial Sequence: Synthetic peptide
QYPMW

SEQ ID NO: 1730 - protein, 17 aa, Artificial Sequence
  Description of Artificial Sequence: Synthetic peptide
YIVPSGGRTYYADSVKG

SEQ ID NO: 1731 - protein, 15 aa, Artificial Sequence
  Description of Artificial Sequence: Synthetic peptide
DRAYGDYVGWNGFDY

SEQ ID NO: 1732 - protein, 11 aa, Artificial Sequence
  Description of Artificial Sequence: Synthetic peptide
RTSQSVSRYLA

SEQ ID NO: 1733 - protein, 7 aa, Artificial Sequence
  Description of Artificial Sequence: Synthetic peptide
GTSNRAT

SEQ ID NO: 1734 - protein, 9 aa, Artificial Sequence
  Description of Artificial Sequence: Synthetic peptide
QQRYNWPIT

SEQ ID NO: 1735 - protein, 5 aa, Artificial Sequence
  Description of Artificial Sequence: Synthetic peptide
QYPMW

SEQ ID NO: 1736 - protein, 17 aa, Artificial Sequence
  Description of Artificial Sequence: Synthetic peptide
YIVPSGGRTYYADSVKG

SEQ ID NO: 1737 - protein, 15 aa, Artificial Sequence
  Description of Artificial Sequence: Synthetic peptide
DRAYGDYVGWNGFDY

SEQ ID NO: 1738 - protein, 12 aa, Artificial Sequence
  Description of Artificial Sequence: Synthetic peptide
RASQSLSRSDLA

SEQ ID NO: 1739 - protein, 7 aa, Artificial Sequence
  Description of Artificial Sequence: Synthetic peptide
GASNRAT

SEQ ID NO: 1740 - protein, 9 aa, Artificial Sequence
  Description of Artificial Sequence: Synthetic peptide
QQRSNWPPT

SEQ ID NO: 1741 - protein, 5 aa, Artificial Sequence
  Description of Artificial Sequence: Synthetic peptide
QYPMW

SEQ ID NO: 1742 - protein, 17 aa, Artificial Sequence
  Description of Artificial Sequence: Synthetic peptide
YIVPSGGRTYYADSVKG

SEQ ID NO: 1743 - protein, 15 aa, Artificial Sequence
  Description of Artificial Sequence: Synthetic peptide
DRAYGDYVGWNGFDY

SEQ ID NO: 1744 - protein, 11 aa, Artificial Sequence
  Description of Artificial Sequence: Synthetic peptide
RASQSVSSYLA

SEQ ID NO: 1745 - protein, 7 aa, Artificial Sequence
  Description of Artificial Sequence: Synthetic peptide
GASNRAT

SEQ ID NO: 1746 - protein, 9 aa, Artificial Sequence
  Description of Artificial Sequence: Synthetic peptide
QQRSNWPIT

SEQ ID NO: 1747 - protein, 5 aa, Artificial Sequence
  Description of Artificial Sequence: Synthetic peptide
QYPMW

SEQ ID NO: 1748 - protein, 17 aa, Artificial Sequence
  Description of Artificial Sequence: Synthetic peptide
YIVPSGGRTYYADSVKG

SEQ ID NO: 1749 - protein, 15 aa, Artificial Sequence
  Description of Artificial Sequence: Synthetic peptide
DRAYGDYVGWNGFDY

SEQ ID NO: 1750 - protein, 11 aa, Artificial Sequence
  Description of Artificial Sequence: Synthetic peptide
RASQSVGRFLA

SEQ ID NO: 1751 - protein, 7 aa, Artificial Sequence
  Description of Artificial Sequence: Synthetic peptide
GASSRAT

SEQ ID NO: 1752 - protein, 9 aa, Artificial Sequence
  Description of Artificial Sequence: Synthetic peptide
QQRGNWPIT

SEQ ID NO: 1753 - protein, 5 aa, Artificial Sequence
  Description of Artificial Sequence: Synthetic peptide
QYPMW

SEQ ID NO: 1754 - protein, 17 aa, Artificial Sequence
  Description of Artificial Sequence: Synthetic peptide
YIVPSGGRTYYADSVKG

SEQ ID NO: 1755 - protein, 15 aa, Artificial Sequence
  Description of Artificial Sequence: Synthetic peptide
DRAYGDYVGWNGFDY

SEQ ID NO: 1756 - protein, 11 aa, Artificial Sequence
  Description of Artificial Sequence: Synthetic peptide
RASQPVGSYLA

SEQ ID NO: 1757 - protein, 7 aa, Artificial Sequence
  Description of Artificial Sequence: Synthetic peptide
GASNRAT

SEQ ID NO: 1758 - protein, 9 aa, Artificial Sequence
  Description of Artificial Sequence: Synthetic peptide
QQRGNWPLT

SEQ ID NO: 1759 - protein, 5 aa, Artificial Sequence
  Description of Artificial Sequence: Synthetic peptide
QYPMW

SEQ ID NO: 1760 - protein, 17 aa, Artificial Sequence
  Description of Artificial Sequence: Synthetic peptide
YIVPSGGRTYYADSVKG

SEQ ID NO: 1761 - protein, 15 aa, Artificial Sequence
  Description of Artificial Sequence: Synthetic peptide
DRAYGDYVGWNGFDY

SEQ ID NO: 1762 - protein, 11 aa, Artificial Sequence
  Description of Artificial Sequence: Synthetic peptide
RASQSVGYYLA

SEQ ID NO: 1763 - protein, 7 aa, Artificial Sequence
  Description of Artificial Sequence: Synthetic peptide
GASRRAT

SEQ ID NO: 1764 - protein, 9 aa, Artificial Sequence
  Description of Artificial Sequence: Synthetic peptide
QQRSNWPIT

SEQ ID NO: 1765 - protein, 5 aa, Artificial Sequence
  Description of Artificial Sequence: Synthetic peptide
QYPMW

SEQ ID NO: 1766 - protein, 17 aa, Artificial Sequence
  Description of Artificial Sequence: Synthetic peptide
YIVPSGGRTYYADSVKG

SEQ ID NO: 1767 - protein, 15 aa, Artificial Sequence
  Description of Artificial Sequence: Synthetic peptide
DRAYGDYVGWNGFDY

SEQ ID NO: 1768 - protein, 11 aa, Artificial Sequence
  Description of Artificial Sequence: Synthetic peptide
RTSQRVDSNLA

SEQ ID NO: 1769 - protein, 7 aa, Artificial Sequence
  Description of Artificial Sequence: Synthetic peptide
GASTRAT

SEQ ID NO: 1770 - protein, 9 aa, Artificial Sequence
  Description of Artificial Sequence: Synthetic peptide
QQRRKWPVT

SEQ ID NO: 1771 - protein, 5 aa, Artificial Sequence
  Description of Artificial Sequence: Synthetic peptide
QYPMW

SEQ ID NO: 1772 - protein, 17 aa, Artificial Sequence
  Description of Artificial Sequence: Synthetic peptide
YIVPSGGRTYYADSVKG

SEQ ID NO: 1773 - protein, 15 aa, Artificial Sequence
  Description of Artificial Sequence: Synthetic peptide
DRAYGDYVGWNGFDY

SEQ ID NO: 1774 - protein, 11 aa, Artificial Sequence
  Description of Artificial Sequence: Synthetic peptide
RASQSVGSDLA

SEQ ID NO: 1775 - protein, 7 aa, Artificial Sequence
  Description of Artificial Sequence: Synthetic peptide
GASSRAT

SEQ ID NO: 1776 - protein, 9 aa, Artificial Sequence
  Description of Artificial Sequence: Synthetic peptide
QQRGNWPIT

SEQ ID NO: 1777 - protein, 5 aa, Artificial Sequence
  Description of Artificial Sequence: Synthetic peptide
QYPMW

SEQ ID NO: 1778 - protein, 17 aa, Artificial Sequence
  Description of Artificial Sequence: Synthetic peptide
YIVPSGGRTYYADSVKG

SEQ ID NO: 1779 - protein, 15 aa, Artificial Sequence
  Description of Artificial Sequence: Synthetic peptide
DRAYGDYVGWNGFDY

SEQ ID NO: 1780 - protein, 11 aa, Artificial Sequence
  Description of Artificial Sequence: Synthetic peptide
RASQNIGSNLA

SEQ ID NO: 1781 - protein, 7 aa, Artificial Sequence
  Description of Artificial Sequence: Synthetic peptide
GASTRAP

SEQ ID NO: 1782 - protein, 9 aa, Artificial Sequence
  Description of Artificial Sequence: Synthetic peptide
QQRRKWPVT

SEQ ID NO: 1783 - protein, 5 aa, Artificial Sequence
  Description of Artificial Sequence: Synthetic peptide
QYPMW

SEQ ID NO: 1784 - protein, 17 aa, Artificial Sequence
  Description of Artificial Sequence: Synthetic peptide
YIVPSGGRTYYADSVKG

SEQ ID NO: 1785 - protein, 15 aa, Artificial Sequence
  Description of Artificial Sequence: Synthetic peptide
DRAYGDYVGWNGFDY

SEQ ID NO: 1786 - protein, 11 aa, Artificial Sequence
  Description of Artificial Sequence: Synthetic peptide
RASQNIITNLA

SEQ ID NO: 1787 - protein, 7 aa, Artificial Sequence
  Description of Artificial Sequence: Synthetic peptide
GASTRAT

SEQ ID NO: 1788 - protein, 9 aa, Artificial Sequence
  Description of Artificial Sequence: Synthetic peptide
QQRSNWPIT

SEQ ID NO: 1789 - protein, 5 aa, Artificial Sequence
  Description of Artificial Sequence: Synthetic peptide
QYPMW

SEQ ID NO: 1790 - protein, 17 aa, Artificial Sequence
  Description of Artificial Sequence: Synthetic peptide
YIVPSGGRTYYADSVKG

SEQ ID NO: 1791 - protein, 15 aa, Artificial Sequence
  Description of Artificial Sequence: Synthetic peptide
DRAYGDYVGWNGFDY

SEQ ID NO: 1792 - protein, 11 aa, Artificial Sequence
  Description of Artificial Sequence: Synthetic peptide
RASHSVGSDLA

SEQ ID NO: 1793 - protein, 7 aa, Artificial Sequence
  Description of Artificial Sequence: Synthetic peptide
GASTRTA

SEQ ID NO: 1794 - protein, 9 aa, Artificial Sequence
  Description of Artificial Sequence: Synthetic peptide
QQRGNWPPT

SEQ ID NO: 1795 - protein, 5 aa, Artificial Sequence
  Description of Artificial Sequence: Synthetic peptide
QYPMW

SEQ ID NO: 1796 - protein, 17 aa, Artificial Sequence
  Description of Artificial Sequence: Synthetic peptide
YIVPSGGRTYYADSVKG

SEQ ID NO: 1797 - protein, 15 aa, Artificial Sequence
  Description of Artificial Sequence: Synthetic peptide
DRAYGDYVGWNGFDY

SEQ ID NO: 1798 - protein, 11 aa, Artificial Sequence
  Description of Artificial Sequence: Synthetic peptide
RASQGVGSDLA

SEQ ID NO: 1799 - protein, 7 aa, Artificial Sequence
  Description of Artificial Sequence: Synthetic peptide
GASSRAT

SEQ ID NO: 1800 - protein, 9 aa, Artificial Sequence
  Description of Artificial Sequence: Synthetic peptide
QQRRSWPPT

SEQ ID NO: 1801 - protein, 5 aa, Artificial Sequence
  Description of Artificial Sequence: Synthetic peptide
QYPMW

SEQ ID NO: 1802 - protein, 17 aa, Artificial Sequence
  Description of Artificial Sequence: Synthetic peptide
YIVPSGGRTYYADSVKG

SEQ ID NO: 1803 - protein, 15 aa, Artificial Sequence
  Description of Artificial Sequence: Synthetic peptide
DRAYGDYVGWNGFDY

SEQ ID NO: 1804 - protein, 11 aa, Artificial Sequence
  Description of Artificial Sequence: Synthetic peptide
RASQNVNRDLA

SEQ ID NO: 1805 - protein, 7 aa, Artificial Sequence
  Description of Artificial Sequence: Synthetic peptide
GASTRAT

SEQ ID NO: 1806 - protein, 9 aa, Artificial Sequence
  Description of Artificial Sequence: Synthetic peptide
QQRGNWPIT

SEQ ID NO: 1807 - protein, 5 aa, Artificial Sequence
  Description of Artificial Sequence: Synthetic peptide
QYPMW

SEQ ID NO: 1808 - protein, 17 aa, Artificial Sequence
  Description of Artificial Sequence: Synthetic peptide
YIVPSGGRTYYADSVKG

SEQ ID NO: 1809 - protein, 15 aa, Artificial Sequence
  Description of Artificial Sequence: Synthetic peptide
DRAYGDYVGWNGFDY

SEQ ID NO: 1810 - protein, 11 aa, Artificial Sequence
  Description of Artificial Sequence: Synthetic peptide
RASQSINSDLA

SEQ ID NO: 1811 - protein, 7 aa, Artificial Sequence
  Description of Artificial Sequence: Synthetic peptide
HTSYRAP

SEQ ID NO: 1812 - protein, 9 aa, Artificial Sequence
  Description of Artificial Sequence: Synthetic peptide
QQRSDWPVT

SEQ ID NO: 1813 - protein, 5 aa, Artificial Sequence
  Description of Artificial Sequence: Synthetic peptide
QYPMW

SEQ ID NO: 1814 - protein, 17 aa, Artificial Sequence
  Description of Artificial Sequence: Synthetic peptide
YIVPSGGRTYYADSVKG

SEQ ID NO: 1815 - protein, 15 aa, Artificial Sequence
  Description of Artificial Sequence: Synthetic peptide
DRAYGDYVGWNGFDY

SEQ ID NO: 1816 - protein, 11 aa, Artificial Sequence
  Description of Artificial Sequence: Synthetic peptide
RASQSISSDLA

SEQ ID NO: 1817 - protein, 7 aa, Artificial Sequence
  Description of Artificial Sequence: Synthetic peptide
GASSRAT

SEQ ID NO: 1818 - protein, 9 aa, Artificial Sequence
  Description of Artificial Sequence: Synthetic peptide
QQRSYWPVT

SEQ ID NO: 1819 - protein, 5 aa, Artificial Sequence
  Description of Artificial Sequence: Synthetic peptide
QYPMW

SEQ ID NO: 1820 - protein, 17 aa, Artificial Sequence
  Description of Artificial Sequence: Synthetic peptide
YIVPSGGRTYYADSVKG

SEQ ID NO: 1821 - protein, 15 aa, Artificial Sequence
  Description of Artificial Sequence: Synthetic peptide
DRAYGDYVGWNGFDY

SEQ ID NO: 1822 - protein, 11 aa, Artificial Sequence
  Description of Artificial Sequence: Synthetic peptide
RASQSISSFLA

SEQ ID NO: 1823 - protein, 7 aa, Artificial Sequence
  Description of Artificial Sequence: Synthetic peptide
DASYRAT

SEQ ID NO: 1824 - protein, 9 aa, Artificial Sequence
  Description of Artificial Sequence: Synthetic peptide
QQRGNWPIT

SEQ ID NO: 1825 - protein, 5 aa, Artificial Sequence
  Description of Artificial Sequence: Synthetic peptide
QYPMW

SEQ ID NO: 1826 - protein, 17 aa, Artificial Sequence
  Description of Artificial Sequence: Synthetic peptide
YIVPSGGRTYYADSVKG

SEQ ID NO: 1827 - protein, 15 aa, Artificial Sequence
  Description of Artificial Sequence: Synthetic peptide
DRAYGDYVGWNGFDY

SEQ ID NO: 1828 - protein, 11 aa, Artificial Sequence
  Description of Artificial Sequence: Synthetic peptide
RASQSVGADLA

SEQ ID NO: 1829 - protein, 7 aa, Artificial Sequence
  Description of Artificial Sequence: Synthetic peptide
HASTRAT

SEQ ID NO: 1830 - protein, 9 aa, Artificial Sequence
  Description of Artificial Sequence: Synthetic peptide
QQRGNWPPT

SEQ ID NO: 1831 - protein, 5 aa, Artificial Sequence
  Description of Artificial Sequence: Synthetic peptide
QYPMW

SEQ ID NO: 1832 - protein, 17 aa, Artificial Sequence
  Description of Artificial Sequence: Synthetic peptide
YIVPSGGRTYYADSVKG

SEQ ID NO: 1833 - protein, 15 aa, Artificial Sequence
  Description of Artificial Sequence: Synthetic peptide
DRAYGDYVGWNGFDY

SEQ ID NO: 1834 - protein, 11 aa, Artificial Sequence
  Description of Artificial Sequence: Synthetic peptide
RASQSVGSDLA

SEQ ID NO: 1835 - protein, 7 aa, Artificial Sequence
  Description of Artificial Sequence: Synthetic peptide
GASHRAT

SEQ ID NO: 1836 - protein, 9 aa, Artificial Sequence
  Description of Artificial Sequence: Synthetic peptide
QQRYNWPIT

SEQ ID NO: 1837 - protein, 5 aa, Artificial Sequence
  Description of Artificial Sequence: Synthetic peptide
QYPMW

SEQ ID NO: 1838 - protein, 17 aa, Artificial Sequence
  Description of Artificial Sequence: Synthetic peptide
YIVPSGGRTYYADSVKG

SEQ ID NO: 1839 - protein, 15 aa, Artificial Sequence
  Description of Artificial Sequence: Synthetic peptide
DRAYGDYVGWNGFDY

SEQ ID NO: 1840 - protein, 11 aa, Artificial Sequence
  Description of Artificial Sequence: Synthetic peptide
RASQSVGSDLA

SEQ ID NO: 1841 - protein, 7 aa, Artificial Sequence
  Description of Artificial Sequence: Synthetic peptide
GASTRAT

SEQ ID NO: 1842 - protein, 9 aa, Artificial Sequence
  Description of Artificial Sequence: Synthetic peptide
QQRGNWPPT

SEQ ID NO: 1843 - protein, 5 aa, Artificial Sequence
  Description of Artificial Sequence: Synthetic peptide
QYPMW

SEQ ID NO: 1844 - protein, 17 aa, Artificial Sequence
  Description of Artificial Sequence: Synthetic peptide
YIVPSGGRTYYADSVKG

SEQ ID NO: 1845 - protein, 15 aa, Artificial Sequence
  Description of Artificial Sequence: Synthetic peptide
DRAYGDYVGWNGFDY

SEQ ID NO: 1846 - protein, 11 aa, Artificial Sequence
  Description of Artificial Sequence: Synthetic peptide
RASQSVGSNLA

SEQ ID NO: 1847 - protein, 7 aa, Artificial Sequence
  Description of Artificial Sequence: Synthetic peptide
GASIRAT

SEQ ID NO: 1848 - protein, 9 aa, Artificial Sequence
  Description of Artificial Sequence: Synthetic peptide
QQRGNWPIT

SEQ ID NO: 1849 - protein, 5 aa, Artificial Sequence
  Description of Artificial Sequence: Synthetic peptide
QYPMW

SEQ ID NO: 1850 - protein, 17 aa, Artificial Sequence
  Description of Artificial Sequence: Synthetic peptide
YIVPSGGRTYYADSVKG

SEQ ID NO: 1851 - protein, 15 aa, Artificial Sequence
  Description of Artificial Sequence: Synthetic peptide
DRAYGDYVGWNGFDY

SEQ ID NO: 1852 - protein, 11 aa, Artificial Sequence
  Description of Artificial Sequence: Synthetic peptide
RASQSVGSNLA

SEQ ID NO: 1853 - protein, 7 aa, Artificial Sequence
  Description of Artificial Sequence: Synthetic peptide
GASTRAT

SEQ ID NO: 1854 - protein, 9 aa, Artificial Sequence
  Description of Artificial Sequence: Synthetic peptide
QQRAYWPVS

SEQ ID NO: 1855 - protein, 5 aa, Artificial Sequence
  Description of Artificial Sequence: Synthetic peptide
QYPMW

SEQ ID NO: 1856 - protein, 17 aa, Artificial Sequence
  Description of Artificial Sequence: Synthetic peptide
YIVPSGGRTYYADSVKG

SEQ ID NO: 1857 - protein, 15 aa, Artificial Sequence
  Description of Artificial Sequence: Synthetic peptide
DRAYGDYVGWNGFDY

SEQ ID NO: 1858 - protein, 11 aa, Artificial Sequence
  Description of Artificial Sequence: Synthetic peptide
RASQSVGSNLA

SEQ ID NO: 1859 - protein, 7 aa, Artificial Sequence
  Description of Artificial Sequence: Synthetic peptide
GASTRAT

SEQ ID NO: 1860 - protein, 9 aa, Artificial Sequence
  Description of Artificial Sequence: Synthetic peptide
QQRGNWPIT

SEQ ID NO: 1861 - protein, 5 aa, Artificial Sequence
  Description of Artificial Sequence: Synthetic peptide
QYPMW

SEQ ID NO: 1862 - protein, 17 aa, Artificial Sequence
  Description of Artificial Sequence: Synthetic peptide
YIVPSGGRTYYADSVKG

SEQ ID NO: 1863 - protein, 15 aa, Artificial Sequence
  Description of Artificial Sequence: Synthetic peptide
DRAYGDYVGWNGFDY

SEQ ID NO: 1864 - protein, 11 aa, Artificial Sequence
  Description of Artificial Sequence: Synthetic peptide
RASQSVGSNLA

SEQ ID NO: 1865 - protein, 7 aa, Artificial Sequence
  Description of Artificial Sequence: Synthetic peptide
GASTRAT

SEQ ID NO: 1866 - protein, 9 aa, Artificial Sequence
  Description of Artificial Sequence: Synthetic peptide
QQRRNWPVT

SEQ ID NO: 1867 - protein, 5 aa, Artificial Sequence
  Description of Artificial Sequence: Synthetic peptide
QYPMW

SEQ ID NO: 1868 - protein, 17 aa, Artificial Sequence
  Description of Artificial Sequence: Synthetic peptide
YIVPSGGRTYYADSVKG

SEQ ID NO: 1869 - protein, 15 aa, Artificial Sequence
  Description of Artificial Sequence: Synthetic peptide
DRAYGDYVGWNGFDY

SEQ ID NO: 1870 - protein, 11 aa, Artificial Sequence
  Description of Artificial Sequence: Synthetic peptide
RASQSVGSQLA

SEQ ID NO: 1871 - protein, 7 aa, Artificial Sequence
  Description of Artificial Sequence: Synthetic peptide
DASTRAT

SEQ ID NO: 1872 - protein, 9 aa, Artificial Sequence
  Description of Artificial Sequence: Synthetic peptide
QQRGNWPIT

SEQ ID NO: 1873 - protein, 5 aa, Artificial Sequence
  Description of Artificial Sequence: Synthetic peptide
QYPMW

SEQ ID NO: 1874 - protein, 17 aa, Artificial Sequence
  Description of Artificial Sequence: Synthetic peptide
YIVPSGGRTYYADSVKG

SEQ ID NO: 1875 - protein, 15 aa, Artificial Sequence
  Description of Artificial Sequence: Synthetic peptide
DRAYGDYVGWNGFDY

SEQ ID NO: 1876 - protein, 11 aa, Artificial Sequence
  Description of Artificial Sequence: Synthetic peptide
RASQSVNSDLA

SEQ ID NO: 1877 - protein, 7 aa, Artificial Sequence
  Description of Artificial Sequence: Synthetic peptide
GASTRAT

SEQ ID NO: 1878 - protein, 9 aa, Artificial Sequence
  Description of Artificial Sequence: Synthetic peptide
QQRGNWPIT

SEQ ID NO: 1879 - protein, 5 aa, Artificial Sequence
  Description of Artificial Sequence: Synthetic peptide
QYPMW

SEQ ID NO: 1880 - protein, 17 aa, Artificial Sequence
  Description of Artificial Sequence: Synthetic peptide
YIVPSGGRTYYADSVKG

SEQ ID NO: 1881 - protein, 15 aa, Artificial Sequence
  Description of Artificial Sequence: Synthetic peptide
DRAYGDYVGWNGFDY

SEQ ID NO: 1882 - protein, 11 aa, Artificial Sequence
  Description of Artificial Sequence: Synthetic peptide
RASQSVNTDLA

SEQ ID NO: 1883 - protein, 7 aa, Artificial Sequence
  Description of Artificial Sequence: Synthetic peptide
GASTRAT

SEQ ID NO: 1884 - protein, 9 aa, Artificial Sequence
  Description of Artificial Sequence: Synthetic peptide
QQRRNWPVT

SEQ ID NO: 1885 - protein, 5 aa, Artificial Sequence
  Description of Artificial Sequence: Synthetic peptide
QYPMW

SEQ ID NO: 1886 - protein, 17 aa, Artificial Sequence
  Description of Artificial Sequence: Synthetic peptide
YIVPSGGRTYYADSVKG

SEQ ID NO: 1887 - protein, 15 aa, Artificial Sequence
  Description of Artificial Sequence: Synthetic peptide
DRAYGDYVGWNGFDY

SEQ ID NO: 1888 - protein, 11 aa, Artificial Sequence
  Description of Artificial Sequence: Synthetic peptide
RASQSVSSDLA

SEQ ID NO: 1889 - protein, 7 aa, Artificial Sequence
  Description of Artificial Sequence: Synthetic peptide
GASTRAT

SEQ ID NO: 1890 - protein, 9 aa, Artificial Sequence
  Description of Artificial Sequence: Synthetic peptide
QQRRKWPVT

SEQ ID NO: 1891 - protein, 5 aa, Artificial Sequence
  Description of Artificial Sequence: Synthetic peptide
QYPMW

SEQ ID NO: 1892 - protein, 17 aa, Artificial Sequence
  Description of Artificial Sequence: Synthetic peptide
YIVPSGGRTYYADSVKG

SEQ ID NO: 1893 - protein, 15 aa, Artificial Sequence
  Description of Artificial Sequence: Synthetic peptide
DRAYGDYVGWNGFDY

SEQ ID NO: 1894 - protein, 11 aa, Artificial Sequence
  Description of Artificial Sequence: Synthetic peptide
RASQSVSSDLA

SEQ ID NO: 1895 - protein, 7 aa, Artificial Sequence
  Description of Artificial Sequence: Synthetic peptide
AASTRAT

SEQ ID NO: 1896 - protein, 9 aa, Artificial Sequence
  Description of Artificial Sequence: Synthetic peptide
QQRSNWPVT

SEQ ID NO: 1897 - protein, 5 aa, Artificial Sequence
  Description of Artificial Sequence: Synthetic peptide
QYPMW

SEQ ID NO: 1898 - protein, 17 aa, Artificial Sequence
  Description of Artificial Sequence: Synthetic peptide
YIVPSGGRTYYADSVKG

SEQ ID NO: 1899 - protein, 15 aa, Artificial Sequence
  Description of Artificial Sequence: Synthetic peptide
DRAYGDYVGWNGFDY

SEQ ID NO: 1900 - protein, 11 aa, Artificial Sequence
  Description of Artificial Sequence: Synthetic peptide
RASQSVSSDLA

SEQ ID NO: 1901 - protein, 7 aa, Artificial Sequence
  Description of Artificial Sequence: Synthetic peptide
HTSYRAP

SEQ ID NO: 1902 - protein, 9 aa, Artificial Sequence
  Description of Artificial Sequence: Synthetic peptide
QQRSDWPVT

SEQ ID NO: 1903 - protein, 5 aa, Artificial Sequence
  Description of Artificial Sequence: Synthetic peptide
QYPMW

SEQ ID NO: 1904 - protein, 17 aa, Artificial Sequence
  Description of Artificial Sequence: Synthetic peptide
YIVPSGGRTYYADSVKG

SEQ ID NO: 1905 - protein, 15 aa, Artificial Sequence
  Description of Artificial Sequence: Synthetic peptide
DRAYGDYVGWNGFDY

SEQ ID NO: 1906 - protein, 11 aa, Artificial Sequence
  Description of Artificial Sequence: Synthetic peptide
RASQSVSSDLA

SEQ ID NO: 1907 - protein, 7 aa, Artificial Sequence
  Description of Artificial Sequence: Synthetic peptide
RASIRAT

SEQ ID NO: 1908 - protein, 9 aa, Artificial Sequence
  Description of Artificial Sequence: Synthetic peptide
QQRGFWPIT

SEQ ID NO: 1909 - protein, 5 aa, Artificial Sequence
  Description of Artificial Sequence: Synthetic peptide
QYPMW

SEQ ID NO: 1910 - protein, 17 aa, Artificial Sequence
  Description of Artificial Sequence: Synthetic peptide
YIVPSGGRTYYADSVKG

SEQ ID NO: 1911 - protein, 15 aa, Artificial Sequence
  Description of Artificial Sequence: Synthetic peptide
DRAYGDYVGWNGFDY

SEQ ID NO: 1912 - protein, 11 aa, Artificial Sequence
  Description of Artificial Sequence: Synthetic peptide
RASQSVSSDLA

SEQ ID NO: 1913 - protein, 7 aa, Artificial Sequence
  Description of Artificial Sequence: Synthetic peptide
RASIRAT

SEQ ID NO: 1914 - protein, 9 aa, Artificial Sequence
  Description of Artificial Sequence: Synthetic peptide
QQRSAWPVT

SEQ ID NO: 1915 - protein, 5 aa, Artificial Sequence
  Description of Artificial Sequence: Synthetic peptide
QYPMW

SEQ ID NO: 1916 - protein, 17 aa, Artificial Sequence
  Description of Artificial Sequence: Synthetic peptide
YIVPSGGRTYYADSVKG

SEQ ID NO: 1917 - protein, 15 aa, Artificial Sequence
  Description of Artificial Sequence: Synthetic peptide
DRAYGDYVGWNGFDY

SEQ ID NO: 1918 - protein, 11 aa, Artificial Sequence
  Description of Artificial Sequence: Synthetic peptide
RASQSVSSDLA

SEQ ID NO: 1919 - protein, 7 aa, Artificial Sequence
  Description of Artificial Sequence: Synthetic peptide
GASTRAT

SEQ ID NO: 1920 - protein, 9 aa, Artificial Sequence
  Description of Artificial Sequence: Synthetic peptide
QQRSNWPPT

SEQ ID NO: 1921 - protein, 5 aa, Artificial Sequence
  Description of Artificial Sequence: Synthetic peptide
QYPMW

SEQ ID NO: 1922 - protein, 17 aa, Artificial Sequence
  Description of Artificial Sequence: Synthetic peptide
YIVPSGGRTYYADSVKG

SEQ ID NO: 1923 - protein, 15 aa, Artificial Sequence
  Description of Artificial Sequence: Synthetic peptide
DRAYGDYVGWNGFDY

SEQ ID NO: 1924 - protein, 11 aa, Artificial Sequence
  Description of Artificial Sequence: Synthetic peptide
RASQSVSSNLA

SEQ ID NO: 1925 - protein, 7 aa, Artificial Sequence
  Description of Artificial Sequence: Synthetic peptide
GASTRAT

SEQ ID NO: 1926 - protein, 9 aa, Artificial Sequence
  Description of Artificial Sequence: Synthetic peptide
QQCYNWPPT

SEQ ID NO: 1927 - protein, 5 aa, Artificial Sequence
  Description of Artificial Sequence: Synthetic peptide
QYPMW

SEQ ID NO: 1928 - protein, 17 aa, Artificial Sequence
  Description of Artificial Sequence: Synthetic peptide
YIVPSGGRTYYADSVKG

SEQ ID NO: 1929 - protein, 15 aa, Artificial Sequence
  Description of Artificial Sequence: Synthetic peptide
DRAYGDYVGWNGFDY

SEQ ID NO: 1930 - protein, 11 aa, Artificial Sequence
  Description of Artificial Sequence: Synthetic peptide
RASQSVSSNLA

SEQ ID NO: 1931 - protein, 7 aa, Artificial Sequence
  Description of Artificial Sequence: Synthetic peptide
GASTRAT

SEQ ID NO: 1932 - protein, 9 aa, Artificial Sequence
  Description of Artificial Sequence: Synthetic peptide
QQRGNWPIT

SEQ ID NO: 1933 - protein, 5 aa, Artificial Sequence
  Description of Artificial Sequence: Synthetic peptide
QYPMW

SEQ ID NO: 1934 - protein, 17 aa, Artificial Sequence
  Description of Artificial Sequence: Synthetic peptide
YIVPSGGRTYYADSVKG

SEQ ID NO: 1935 - protein, 15 aa, Artificial Sequence
  Description of Artificial Sequence: Synthetic peptide
DRAYGDYVGWNGFDY

SEQ ID NO: 1936 - protein, 11 aa, Artificial Sequence
  Description of Artificial Sequence: Synthetic peptide
RASQSVSSNLA

SEQ ID NO: 1937 - protein, 7 aa, Artificial Sequence
  Description of Artificial Sequence: Synthetic peptide
HASTRAT

SEQ ID NO: 1938 - protein, 9 aa, Artificial Sequence
  Description of Artificial Sequence: Synthetic peptide
QQRGFWPIT

SEQ ID NO: 1939 - protein, 5 aa, Artificial Sequence
  Description of Artificial Sequence: Synthetic peptide
QYPMW

SEQ ID NO: 1940 - protein, 17 aa, Artificial Sequence
  Description of Artificial Sequence: Synthetic peptide
YIVPSGGRTYYADSVKG

SEQ ID NO: 1941 - protein, 15 aa, Artificial Sequence
  Description of Artificial Sequence: Synthetic peptide
DRAYGDYVGWNGFDY

SEQ ID NO: 1942 - protein, 11 aa, Artificial Sequence
  Description of Artificial Sequence: Synthetic peptide
RASQSVSSYLA

SEQ ID NO: 1943 - protein, 7 aa, Artificial Sequence
  Description of Artificial Sequence: Synthetic peptide
GASNTAT

SEQ ID NO: 1944 - protein, 9 aa, Artificial Sequence
  Description of Artificial Sequence: Synthetic peptide
QQRRNWPPT

SEQ ID NO: 1945 - protein, 5 aa, Artificial Sequence
  Description of Artificial Sequence: Synthetic peptide
QYPMW

SEQ ID NO: 1946 - protein, 17 aa, Artificial Sequence
  Description of Artificial Sequence: Synthetic peptide
YIVPSGGRTYYADSVKG

SEQ ID NO: 1947 - protein, 15 aa, Artificial Sequence
  Description of Artificial Sequence: Synthetic peptide
DRAYGDYVGWNGFDY

SEQ ID NO: 1948 - protein, 11 aa, Artificial Sequence
  Description of Artificial Sequence: Synthetic peptide
RASQSVWSNLA

SEQ ID NO: 1949 - protein, 7 aa, Artificial Sequence
  Description of Artificial Sequence: Synthetic peptide
DASYRAT

SEQ ID NO: 1950 - protein, 9 aa, Artificial Sequence
  Description of Artificial Sequence: Synthetic peptide
QQRGNWPIT

SEQ ID NO: 1951 - protein, 5 aa, Artificial Sequence
  Description of Artificial Sequence: Synthetic peptide
QYPMW

SEQ ID NO: 1952 - protein, 17 aa, Artificial Sequence
  Description of Artificial Sequence: Synthetic peptide
YIVPSGGRTYYADSVKG

SEQ ID NO: 1953 - protein, 15 aa, Artificial Sequence
  Description of Artificial Sequence: Synthetic peptide
DRAYGDYVGWNGFDY

SEQ ID NO: 1954 - protein, 11 aa, Artificial Sequence
  Description of Artificial Sequence: Synthetic peptide
RASQTVGTFLA

SEQ ID NO: 1955 - protein, 7 aa, Artificial Sequence
  Description of Artificial Sequence: Synthetic peptide
GASTRAT

SEQ ID NO: 1956 - protein, 9 aa, Artificial Sequence
  Description of Artificial Sequence: Synthetic peptide
QQRSNWPPT

SEQ ID NO: 1957 - protein, 5 aa, Artificial Sequence
  Description of Artificial Sequence: Synthetic peptide
QYPMW

SEQ ID NO: 1958 - protein, 17 aa, Artificial Sequence
  Description of Artificial Sequence: Synthetic peptide
YIVPSGGRTYYADSVKG

SEQ ID NO: 1959 - protein, 15 aa, Artificial Sequence
  Description of Artificial Sequence: Synthetic peptide
DRAYGDYVGWNGFDY

SEQ ID NO: 1960 - protein, 11 aa, Artificial Sequence
  Description of Artificial Sequence: Synthetic peptide
RASESVNSDLA

SEQ ID NO: 1961 - protein, 7 aa, Artificial Sequence
  Description of Artificial Sequence: Synthetic peptide
GASTRAT

SEQ ID NO: 1962 - protein, 9 aa, Artificial Sequence
  Description of Artificial Sequence: Synthetic peptide
QQRGSWPIT

SEQ ID NO: 1963 - protein, 5 aa, Artificial Sequence
  Description of Artificial Sequence: Synthetic peptide
QYPMW

SEQ ID NO: 1964 - protein, 17 aa, Artificial Sequence
  Description of Artificial Sequence: Synthetic peptide
YIVPSGGRTYYADSVKG

SEQ ID NO: 1965 - protein, 15 aa, Artificial Sequence
  Description of Artificial Sequence: Synthetic peptide
DRAYGDYVGWNGFDY

SEQ ID NO: 1966 - protein, 11 aa, Artificial Sequence
  Description of Artificial Sequence: Synthetic peptide
RASQNINSDLA

SEQ ID NO: 1967 - protein, 7 aa, Artificial Sequence
  Description of Artificial Sequence: Synthetic peptide
GASTRAT

SEQ ID NO: 1968 - protein, 9 aa, Artificial Sequence
  Description of Artificial Sequence: Synthetic peptide
QQRGGWPIT

SEQ ID NO: 1969 - protein, 5 aa, Artificial Sequence
  Description of Artificial Sequence: Synthetic peptide
QYPMW

SEQ ID NO: 1970 - protein, 17 aa, Artificial Sequence
  Description of Artificial Sequence: Synthetic peptide
YIVPSGGRTYYADSVKG

SEQ ID NO: 1971 - protein, 15 aa, Artificial Sequence
  Description of Artificial Sequence: Synthetic peptide
DRAYGDYVGWNGFDY

SEQ ID NO: 1972 - protein, 11 aa, Artificial Sequence
  Description of Artificial Sequence: Synthetic peptide
RASQTIFGDLA

SEQ ID NO: 1973 - protein, 7 aa, Artificial Sequence
  Description of Artificial Sequence: Synthetic peptide
GASTRAT

SEQ ID NO: 1974 - protein, 9 aa, Artificial Sequence
  Description of Artificial Sequence: Synthetic peptide
QQRSNWPPT

SEQ ID NO: 1975 - protein, 5 aa, Artificial Sequence
  Description of Artificial Sequence: Synthetic peptide
QYPMW

SEQ ID NO: 1976 - protein, 17 aa, Artificial Sequence
  Description of Artificial Sequence: Synthetic peptide
YIVPSGGRTYYADSVKG

SEQ ID NO: 1977 - protein, 15 aa, Artificial Sequence
  Description of Artificial Sequence: Synthetic peptide
DRAYGDYVGWNGFDY

SEQ ID NO: 1978 - protein, 11 aa, Artificial Sequence
  Description of Artificial Sequence: Synthetic peptide
RASRSVSNNVA

SEQ ID NO: 1979 - protein, 7 aa, Artificial Sequence
  Description of Artificial Sequence: Synthetic peptide
EASNRAT

SEQ ID NO: 1980 - protein, 9 aa, Artificial Sequence
  Description of Artificial Sequence: Synthetic peptide
QQRGGWPIT

SEQ ID NO: 1981 - protein, 5 aa, Artificial Sequence
  Description of Artificial Sequence: Synthetic peptide
QYPMW

SEQ ID NO: 1982 - protein, 17 aa, Artificial Sequence
  Description of Artificial Sequence: Synthetic peptide
YIVPSGGRTYYADSVKG

SEQ ID NO: 1983 - protein, 15 aa, Artificial Sequence
  Description of Artificial Sequence: Synthetic peptide
DRAYGDYVGWNGFDY

SEQ ID NO: 1984 - protein, 11 aa, Artificial Sequence
  Description of Artificial Sequence: Synthetic peptide
RASQSVSNYLA

SEQ ID NO: 1985 - protein, 7 aa, Artificial Sequence
  Description of Artificial Sequence: Synthetic peptide
GASNRAT

SEQ ID NO: 1986 - protein, 9 aa, Artificial Sequence
  Description of Artificial Sequence: Synthetic peptide
QQRRSWPPT

SEQ ID NO: 1987 - protein, 5 aa, Artificial Sequence
  Description of Artificial Sequence: Synthetic peptide
QYPMW

SEQ ID NO: 1988 - protein, 17 aa, Artificial Sequence
  Description of Artificial Sequence: Synthetic peptide
YIVPSGGRTYYADSVKG

SEQ ID NO: 1989 - protein, 15 aa, Artificial Sequence
  Description of Artificial Sequence: Synthetic peptide
DRAYGDYVGWNGFDY

SEQ ID NO: 1990 - protein, 11 aa, Artificial Sequence
  Description of Artificial Sequence: Synthetic peptide
RASQSVGSDLA

SEQ ID NO: 1991 - protein, 7 aa, Artificial Sequence
  Description of Artificial Sequence: Synthetic peptide
GASTRAT

SEQ ID NO: 1992 - protein, 9 aa, Artificial Sequence
  Description of Artificial Sequence: Synthetic peptide
QQRSNWPVT

SEQ ID NO: 1993 - protein, 5 aa, Artificial Sequence
  Description of Artificial Sequence: Synthetic peptide
QYPMW

SEQ ID NO: 1994 - protein, 17 aa, Artificial Sequence
  Description of Artificial Sequence: Synthetic peptide
YIVPSGGRTYYADSVKG

SEQ ID NO: 1995 - protein, 15 aa, Artificial Sequence
  Description of Artificial Sequence: Synthetic peptide
DRAYGDYVGWNGFDY

SEQ ID NO: 1996 - protein, 11 aa, Artificial Sequence
  Description of Artificial Sequence: Synthetic peptide
RASQSVNSHVA

SEQ ID NO: 1997 - protein, 7 aa, Artificial Sequence
  Description of Artificial Sequence: Synthetic peptide
EASDRAA

SEQ ID NO: 1998 - protein, 9 aa, Artificial Sequence
  Description of Artificial Sequence: Synthetic peptide
QQRMYWPPT

SEQ ID NO: 1999 - protein, 5 aa, Artificial Sequence
  Description of Artificial Sequence: Synthetic peptide
QYPMW

SEQ ID NO: 2000 - protein, 17 aa, Artificial Sequence
  Description of Artificial Sequence: Synthetic peptide
YIVPSGGRTYYADSVKG

SEQ ID NO: 2001 - protein, 15 aa, Artificial Sequence
  Description of Artificial Sequence: Synthetic peptide
DRAYGDYVGWNGFDY

SEQ ID NO: 2002 - protein, 12 aa, Artificial Sequence
  Description of Artificial Sequence: Synthetic peptide
RASQSLSRSDLA

SEQ ID NO: 2003 - protein, 7 aa, Artificial Sequence
  Description of Artificial Sequence: Synthetic peptide
GASNRAT

SEQ ID NO: 2004 - protein, 9 aa, Artificial Sequence
  Description of Artificial Sequence: Synthetic peptide
QQRSNWPPT

SEQ ID NO: 2005 - protein, 5 aa, Artificial Sequence
  Description of Artificial Sequence: Synthetic peptide
QYPMW

SEQ ID NO: 2006 - protein, 17 aa, Artificial Sequence
  Description of Artificial Sequence: Synthetic peptide
YIVPSGGRTYYADSVKG

SEQ ID NO: 2007 - protein, 15 aa, Artificial Sequence
  Description of Artificial Sequence: Synthetic peptide
DRAYGDYVGWNGFDY

SEQ ID NO: 2008 - protein, 11 aa, Artificial Sequence
  Description of Artificial Sequence: Synthetic peptide
RASQNIGSNLA

SEQ ID NO: 2009 - protein, 7 aa, Artificial Sequence
  Description of Artificial Sequence: Synthetic peptide
GATTRAT

SEQ ID NO: 2010 - protein, 9 aa, Artificial Sequence
  Description of Artificial Sequence: Synthetic peptide
QQRGNWPIT

SEQ ID NO: 2011 - protein, 5 aa, Artificial Sequence
  Description of Artificial Sequence: Synthetic peptide
QYPMW

SEQ ID NO: 2012 - protein, 17 aa, Artificial Sequence
  Description of Artificial Sequence: Synthetic peptide
YIVPSGGRTYYADSVKG

SEQ ID NO: 2013 - protein, 15 aa, Artificial Sequence
  Description of Artificial Sequence: Synthetic peptide
DRAYGDYVGWNGFDY

SEQ ID NO: 2014 - protein, 11 aa, Artificial Sequence
  Description of Artificial Sequence: Synthetic peptide
RASQGINNNLA

SEQ ID NO: 2015 - protein, 7 aa, Artificial Sequence
  Description of Artificial Sequence: Synthetic peptide
DASNRAT

SEQ ID NO: 2016 - protein, 9 aa, Artificial Sequence
  Description of Artificial Sequence: Synthetic peptide
QQRGNWPIT

SEQ ID NO: 2017 - protein, 5 aa, Artificial Sequence
  Description of Artificial Sequence: Synthetic peptide
QYPMW

SEQ ID NO: 2018 - protein, 17 aa, Artificial Sequence
  Description of Artificial Sequence: Synthetic peptide
YIVPSGGRTYYADSVKG

SEQ ID NO: 2019 - protein, 15 aa, Artificial Sequence
  Description of Artificial Sequence: Synthetic peptide
DRAYGDYVGWNGFDY

SEQ ID NO: 2020 - protein, 11 aa, Artificial Sequence
  Description of Artificial Sequence: Synthetic peptide
RASQSVSSDLA

SEQ ID NO: 2021 - protein, 7 aa, Artificial Sequence
  Description of Artificial Sequence: Synthetic peptide
GASNRAT

SEQ ID NO: 2022 - protein, 9 aa, Artificial Sequence
  Description of Artificial Sequence: Synthetic peptide
QQRSKWPIT

SEQ ID NO: 2023 - protein, 5 aa, Artificial Sequence
  Description of Artificial Sequence: Synthetic peptide
QYPMW

SEQ ID NO: 2024 - protein, 17 aa, Artificial Sequence
  Description of Artificial Sequence: Synthetic peptide
YIVPSGGRTYYADSVKG

SEQ ID NO: 2025 - protein, 15 aa, Artificial Sequence
  Description of Artificial Sequence: Synthetic peptide
DRAYGDYVGWNGFDY

SEQ ID NO: 2026 - protein, 11 aa, Artificial Sequence
  Description of Artificial Sequence: Synthetic peptide
RASQSVGSDLA

SEQ ID NO: 2027 - protein, 7 aa, Artificial Sequence
  Description of Artificial Sequence: Synthetic peptide
GASNRAT

SEQ ID NO: 2028 - protein, 9 aa, Artificial Sequence
  Description of Artificial Sequence: Synthetic peptide
QQRSNWPIT

SEQ ID NO: 2029 - protein, 5 aa, Artificial Sequence
  Description of Artificial Sequence: Synthetic peptide
QYPMW

SEQ ID NO: 2030 - protein, 17 aa, Artificial Sequence
  Description of Artificial Sequence: Synthetic peptide
YIVPSGGRTYYADSVKG

SEQ ID NO: 2031 - protein, 15 aa, Artificial Sequence
  Description of Artificial Sequence: Synthetic peptide
DRAYGDYVGWNGFDY

SEQ ID NO: 2032 - protein, 11 aa, Artificial Sequence
  Description of Artificial Sequence: Synthetic peptide
RASQSVGSFLA

SEQ ID NO: 2033 - protein, 7 aa, Artificial Sequence
  Description of Artificial Sequence: Synthetic peptide
GASNRAP

SEQ ID NO: 2034 - protein, 9 aa, Artificial Sequence
  Description of Artificial Sequence: Synthetic peptide
QQRHNWPIT

SEQ ID NO: 2035 - protein, 5 aa, Artificial Sequence
  Description of Artificial Sequence: Synthetic peptide
QYPMW

SEQ ID NO: 2036 - protein, 17 aa, Artificial Sequence
  Description of Artificial Sequence: Synthetic peptide
YIVPSGGRTYYADSVKG

SEQ ID NO: 2037 - protein, 15 aa, Artificial Sequence
  Description of Artificial Sequence: Synthetic peptide
DRAYGDYVGWNGFDY

SEQ ID NO: 2038 - protein, 11 aa, Artificial Sequence
  Description of Artificial Sequence: Synthetic peptide
RASQSVSNYLA

SEQ ID NO: 2039 - protein, 7 aa, Artificial Sequence
  Description of Artificial Sequence: Synthetic peptide
GVSNRAT

SEQ ID NO: 2040 - protein, 9 aa, Artificial Sequence
  Description of Artificial Sequence: Synthetic peptide
QQRGNWPPT

SEQ ID NO: 2041 - protein, 5 aa, Artificial Sequence
  Description of Artificial Sequence: Synthetic peptide
QYPMW

SEQ ID NO: 2042 - protein, 17 aa, Artificial Sequence
  Description of Artificial Sequence: Synthetic peptide
YIVPSGGRTYYADSVKG

SEQ ID NO: 2043 - protein, 15 aa, Artificial Sequence
  Description of Artificial Sequence: Synthetic peptide
DRAYGDYVGWNGFDY

SEQ ID NO: 2044 - protein, 12 aa, Artificial Sequence
  Description of Artificial Sequence: Synthetic peptide
RASQNLGRSDLA

SEQ ID NO: 2045 - protein, 7 aa, Artificial Sequence
  Description of Artificial Sequence: Synthetic peptide
GVSNRAT

SEQ ID NO: 2046 - protein, 9 aa, Artificial Sequence
  Description of Artificial Sequence: Synthetic peptide
QQRSNWPPT

SEQ ID NO: 2047 - protein, 5 aa, Artificial Sequence
  Description of Artificial Sequence: Synthetic peptide
QYPMW

SEQ ID NO: 2048 - protein, 17 aa, Artificial Sequence
  Description of Artificial Sequence: Synthetic peptide
YIVPSGGRTYYADSVKG

SEQ ID NO: 2049 - protein, 15 aa, Artificial Sequence
  Description of Artificial Sequence: Synthetic peptide
DRAYGDYVGWNGFDY

SEQ ID NO: 2050 - protein, 11 aa, Artificial Sequence
  Description of Artificial Sequence: Synthetic peptide
RASQNVHTYLA

SEQ ID NO: 2051 - protein, 7 aa, Artificial Sequence
  Description of Artificial Sequence: Synthetic peptide
EASNRAT

SEQ ID NO: 2052 - protein, 9 aa, Artificial Sequence
  Description of Artificial Sequence: Synthetic peptide
QQRGGWPIT

SEQ ID NO: 2053 - protein, 5 aa, Artificial Sequence
  Description of Artificial Sequence: Synthetic peptide
QYPMW

SEQ ID NO: 2054 - protein, 17 aa, Artificial Sequence
  Description of Artificial Sequence: Synthetic peptide
YIVPSGGRTYYADSVKG

SEQ ID NO: 2055 - protein, 15 aa, Artificial Sequence
  Description of Artificial Sequence: Synthetic peptide
DRAYGDYVGWNGFDY

SEQ ID NO: 2056 - protein, 11 aa, Artificial Sequence
  Description of Artificial Sequence: Synthetic peptide
RASQSISSFLA

SEQ ID NO: 2057 - protein, 7 aa, Artificial Sequence
  Description of Artificial Sequence: Synthetic peptide
DASYRAT

SEQ ID NO: 2058 - protein, 9 aa, Artificial Sequence
  Description of Artificial Sequence: Synthetic peptide
QQRGNWPIT

SEQ ID NO: 2059 - protein, 5 aa, Artificial Sequence
  Description of Artificial Sequence: Synthetic peptide
QYPMW

SEQ ID NO: 2060 - protein, 17 aa, Artificial Sequence
  Description of Artificial Sequence: Synthetic peptide
YIVPSGGRTYYADSVKG

SEQ ID NO: 2061 - protein, 15 aa, Artificial Sequence
  Description of Artificial Sequence: Synthetic peptide
DRAYGDYVGWNGFDY

SEQ ID NO: 2062 - protein, 12 aa, Artificial Sequence
  Description of Artificial Sequence: Synthetic peptide
RASQSLGRGDLA

SEQ ID NO: 2063 - protein, 7 aa, Artificial Sequence
  Description of Artificial Sequence: Synthetic peptide
GASSRAT

SEQ ID NO: 2064 - protein, 9 aa, Artificial Sequence
  Description of Artificial Sequence: Synthetic peptide
QQRSNWPPT

SEQ ID NO: 2065 - protein, 5 aa, Artificial Sequence
  Description of Artificial Sequence: Synthetic peptide
QYPMW

SEQ ID NO: 2066 - protein, 17 aa, Artificial Sequence
  Description of Artificial Sequence: Synthetic peptide
YIVPSGGRTYYADSVKG

SEQ ID NO: 2067 - protein, 15 aa, Artificial Sequence
  Description of Artificial Sequence: Synthetic peptide
DRAYGDYVGWNGFDY

SEQ ID NO: 2068 - protein, 12 aa, Artificial Sequence
  Description of Artificial Sequence: Synthetic peptide
RASQSLGRSDLA

SEQ ID NO: 2069 - protein, 7 aa, Artificial Sequence
  Description of Artificial Sequence: Synthetic peptide
GVSNRVT

SEQ ID NO: 2070 - protein, 9 aa, Artificial Sequence
  Description of Artificial Sequence: Synthetic peptide
QQRSNWPST

SEQ ID NO: 2071 - protein, 5 aa, Artificial Sequence
  Description of Artificial Sequence: Synthetic peptide
QYPMW

SEQ ID NO: 2072 - protein, 17 aa, Artificial Sequence
  Description of Artificial Sequence: Synthetic peptide
YIVPSGGRTYYADSVKG

SEQ ID NO: 2073 - protein, 15 aa, Artificial Sequence
  Description of Artificial Sequence: Synthetic peptide
DRAYGDYVGWNGFDY

SEQ ID NO: 2074 - protein, 12 aa, Artificial Sequence
  Description of Artificial Sequence: Synthetic peptide
RASQSLSGNYLA

SEQ ID NO: 2075 - protein, 7 aa, Artificial Sequence
  Description of Artificial Sequence: Synthetic peptide
GASSRAT

SEQ ID NO: 2076 - protein, 9 aa, Artificial Sequence
  Description of Artificial Sequence: Synthetic peptide
QQRSNWPIT

SEQ ID NO: 2077 - protein, 5 aa, Artificial Sequence
  Description of Artificial Sequence: Synthetic peptide
QYPMW

SEQ ID NO: 2078 - protein, 17 aa, Artificial Sequence
  Description of Artificial Sequence: Synthetic peptide
YIVPSGGRTYYADSVKG

SEQ ID NO: 2079 - protein, 15 aa, Artificial Sequence
  Description of Artificial Sequence: Synthetic peptide
DRAYGDYVGWNGFDY

SEQ ID NO: 2080 - protein, 11 aa, Artificial Sequence
  Description of Artificial Sequence: Synthetic peptide
RASQSVARYLA

SEQ ID NO: 2081 - protein, 7 aa, Artificial Sequence
  Description of Artificial Sequence: Synthetic peptide
GASRRGT

SEQ ID NO: 2082 - protein, 9 aa, Artificial Sequence
  Description of Artificial Sequence: Synthetic peptide
QQRRKWPVT

SEQ ID NO: 2083 - protein, 5 aa, Artificial Sequence
  Description of Artificial Sequence: Synthetic peptide
QYPMW

SEQ ID NO: 2084 - protein, 17 aa, Artificial Sequence
  Description of Artificial Sequence: Synthetic peptide
YIVPSGGRTYYADSVKG

SEQ ID NO: 2085 - protein, 15 aa, Artificial Sequence
  Description of Artificial Sequence: Synthetic peptide
DRAYGDYVGWNGFDY

SEQ ID NO: 2086 - protein, 11 aa, Artificial Sequence
  Description of Artificial Sequence: Synthetic peptide
RASQSVGADLA

SEQ ID NO: 2087 - protein, 7 aa, Artificial Sequence
  Description of Artificial Sequence: Synthetic peptide
HASTRAT

SEQ ID NO: 2088 - protein, 9 aa, Artificial Sequence
  Description of Artificial Sequence: Synthetic peptide
QQRGFWPIT

SEQ ID NO: 2089 - protein, 5 aa, Artificial Sequence
  Description of Artificial Sequence: Synthetic peptide
QYPMW

SEQ ID NO: 2090 - protein, 17 aa, Artificial Sequence
  Description of Artificial Sequence: Synthetic peptide
YIVPSGGRTYYADSVKG

SEQ ID NO: 2091 - protein, 15 aa, Artificial Sequence
  Description of Artificial Sequence: Synthetic peptide
DRAYGDYVGWNGFDY

SEQ ID NO: 2092 - protein, 11 aa, Artificial Sequence
  Description of Artificial Sequence: Synthetic peptide
RASQSVGSDLA

SEQ ID NO: 2093 - protein, 7 aa, Artificial Sequence
  Description of Artificial Sequence: Synthetic peptide
GASTRAT

SEQ ID NO: 2094 - protein, 9 aa, Artificial Sequence
  Description of Artificial Sequence: Synthetic peptide
QQRRSWPPT

SEQ ID NO: 2095 - protein, 5 aa, Artificial Sequence
  Description of Artificial Sequence: Synthetic peptide
QYPMW

SEQ ID NO: 2096 - protein, 17 aa, Artificial Sequence
  Description of Artificial Sequence: Synthetic peptide
YIVPSGGRTYYADSVKG

SEQ ID NO: 2097 - protein, 15 aa, Artificial Sequence
  Description of Artificial Sequence: Synthetic peptide
DRAYGDYVGWNGFDY

SEQ ID NO: 2098 - protein, 11 aa, Artificial Sequence
  Description of Artificial Sequence: Synthetic peptide
RASQSVGSDLA

SEQ ID NO: 2099 - protein, 7 aa, Artificial Sequence
  Description of Artificial Sequence: Synthetic peptide
GTSTRAT

SEQ ID NO: 2100 - protein, 9 aa, Artificial Sequence
  Description of Artificial Sequence: Synthetic peptide
QQRGNWPIT

SEQ ID NO: 2101 - protein, 5 aa, Artificial Sequence
  Description of Artificial Sequence: Synthetic peptide
QYPMW

SEQ ID NO: 2102 - protein, 17 aa, Artificial Sequence
  Description of Artificial Sequence: Synthetic peptide
YIVPSGGRTYYADSVKG

SEQ ID NO: 2103 - protein, 15 aa, Artificial Sequence
  Description of Artificial Sequence: Synthetic peptide
DRAYGDYVGWNGFDY

SEQ ID NO: 2104 - protein, 12 aa, Artificial Sequence
  Description of Artificial Sequence: Synthetic peptide
RASQSVGSNFLA

SEQ ID NO: 2105 - protein, 7 aa, Artificial Sequence
  Description of Artificial Sequence: Synthetic peptide
GASSRAS

SEQ ID NO: 2106 - protein, 9 aa, Artificial Sequence
  Description of Artificial Sequence: Synthetic peptide
QQRSSWPIT

SEQ ID NO: 2107 - protein, 5 aa, Artificial Sequence
  Description of Artificial Sequence: Synthetic peptide
QYPMW

SEQ ID NO: 2108 - protein, 17 aa, Artificial Sequence
  Description of Artificial Sequence: Synthetic peptide
YIVPSGGRTYYADSVKG

SEQ ID NO: 2109 - protein, 15 aa, Artificial Sequence
  Description of Artificial Sequence: Synthetic peptide
DRAYGDYVGWNGFDY

SEQ ID NO: 2110 - protein, 11 aa, Artificial Sequence
  Description of Artificial Sequence: Synthetic peptide
RASQSVNSNLA

SEQ ID NO: 2111 - protein, 7 aa, Artificial Sequence
  Description of Artificial Sequence: Synthetic peptide
EASNRAT

SEQ ID NO: 2112 - protein, 9 aa, Artificial Sequence
  Description of Artificial Sequence: Synthetic peptide
QQRAYWPVS

SEQ ID NO: 2113 - protein, 5 aa, Artificial Sequence
  Description of Artificial Sequence: Synthetic peptide
QYPMW

SEQ ID NO: 2114 - protein, 17 aa, Artificial Sequence
  Description of Artificial Sequence: Synthetic peptide
YIVPSGGRTYYADSVKG

SEQ ID NO: 2115 - protein, 15 aa, Artificial Sequence
  Description of Artificial Sequence: Synthetic peptide
DRAYGDYVGWNGFDY

SEQ ID NO: 2116 - protein, 11 aa, Artificial Sequence
  Description of Artificial Sequence: Synthetic peptide
RASQSVSRHLA

SEQ ID NO: 2117 - protein, 7 aa, Artificial Sequence
  Description of Artificial Sequence: Synthetic peptide
GASNRAT

SEQ ID NO: 2118 - protein, 9 aa, Artificial Sequence
  Description of Artificial Sequence: Synthetic peptide
QQRYNWPIT

SEQ ID NO: 2119 - protein, 5 aa, Artificial Sequence
  Description of Artificial Sequence: Synthetic peptide
QYPMW

SEQ ID NO: 2120 - protein, 17 aa, Artificial Sequence
  Description of Artificial Sequence: Synthetic peptide
YIVPSGGRTYYADSVKG

SEQ ID NO: 2121 - protein, 15 aa, Artificial Sequence
  Description of Artificial Sequence: Synthetic peptide
DRAYGDYVGWNGFDY

SEQ ID NO: 2122 - protein, 11 aa, Artificial Sequence
  Description of Artificial Sequence: Synthetic peptide
RASQSVSSDVA

SEQ ID NO: 2123 - protein, 7 aa, Artificial Sequence
  Description of Artificial Sequence: Synthetic peptide
GASARAT

SEQ ID NO: 2124 - protein, 9 aa, Artificial Sequence
  Description of Artificial Sequence: Synthetic peptide
QQRGNWPIT

SEQ ID NO: 2125 - protein, 5 aa, Artificial Sequence
  Description of Artificial Sequence: Synthetic peptide
QYPMW

SEQ ID NO: 2126 - protein, 17 aa, Artificial Sequence
  Description of Artificial Sequence: Synthetic peptide
YIVPSGGRTYYADSVKG

SEQ ID NO: 2127 - protein, 15 aa, Artificial Sequence
  Description of Artificial Sequence: Synthetic peptide
DRAYGDYVGWNGFDY

SEQ ID NO: 2128 - protein, 11 aa, Artificial Sequence
  Description of Artificial Sequence: Synthetic peptide
RASQSVSSNLA

SEQ ID NO: 2129 - protein, 7 aa, Artificial Sequence
  Description of Artificial Sequence: Synthetic peptide
DASYRAT

SEQ ID NO: 2130 - protein, 9 aa, Artificial Sequence
  Description of Artificial Sequence: Synthetic peptide
QQRGNWPIT

SEQ ID NO: 2131 - protein, 5 aa, Artificial Sequence
  Description of Artificial Sequence: Synthetic peptide
QYPMW

SEQ ID NO: 2132 - protein, 17 aa, Artificial Sequence
  Description of Artificial Sequence: Synthetic peptide
YIVPSGGRTYYADSVKG

SEQ ID NO: 2133 - protein, 15 aa, Artificial Sequence
  Description of Artificial Sequence: Synthetic peptide
DRAYGDYVGWNGFDY

SEQ ID NO: 2134 - protein, 12 aa, Artificial Sequence
  Description of Artificial Sequence: Synthetic peptide
RASQSVSSSHLA

SEQ ID NO: 2135 - protein, 7 aa, Artificial Sequence
  Description of Artificial Sequence: Synthetic peptide
GASNRAT

SEQ ID NO: 2136 - protein, 9 aa, Artificial Sequence
  Description of Artificial Sequence: Synthetic peptide
QQRRNWPPT

SEQ ID NO: 2137 - protein, 5 aa, Artificial Sequence
  Description of Artificial Sequence: Synthetic peptide
QYPMW

SEQ ID NO: 2138 - protein, 17 aa, Artificial Sequence
  Description of Artificial Sequence: Synthetic peptide
YIVPSGGRTYYADSVKG

SEQ ID NO: 2139 - protein, 15 aa, Artificial Sequence
  Description of Artificial Sequence: Synthetic peptide
DRAYGDYVGWNGFDY

SEQ ID NO: 2140 - protein, 12 aa, Artificial Sequence
  Description of Artificial Sequence: Synthetic peptide
RASQSVSSSQIA

SEQ ID NO: 2141 - protein, 7 aa, Artificial Sequence
  Description of Artificial Sequence: Synthetic peptide
GASYRAT

SEQ ID NO: 2142 - protein, 9 aa, Artificial Sequence
  Description of Artificial Sequence: Synthetic peptide
QQRSNWPVT

SEQ ID NO: 2143 - protein, 5 aa, Artificial Sequence
  Description of Artificial Sequence: Synthetic peptide
QYPMW

SEQ ID NO: 2144 - protein, 17 aa, Artificial Sequence
  Description of Artificial Sequence: Synthetic peptide
YIVPSGGRTYYADSVKG

SEQ ID NO: 2145 - protein, 15 aa, Artificial Sequence
  Description of Artificial Sequence: Synthetic peptide
DRAYGDYVGWNGFDY

SEQ ID NO: 2146 - protein, 12 aa, Artificial Sequence
  Description of Artificial Sequence: Synthetic peptide
RASQSVSSSQLA

SEQ ID NO: 2147 - protein, 7 aa, Artificial Sequence
  Description of Artificial Sequence: Synthetic peptide
GASNRAT

SEQ ID NO: 2148 - protein, 9 aa, Artificial Sequence
  Description of Artificial Sequence: Synthetic peptide
QQRSRWPIT

SEQ ID NO: 2149 - protein, 5 aa, Artificial Sequence
  Description of Artificial Sequence: Synthetic peptide
QYPMW

SEQ ID NO: 2150 - protein, 17 aa, Artificial Sequence
  Description of Artificial Sequence: Synthetic peptide
YIVPSGGRTYYADSVKG

SEQ ID NO: 2151 - protein, 15 aa, Artificial Sequence
  Description of Artificial Sequence: Synthetic peptide
DRAYGDYVGWNGFDY

SEQ ID NO: 2152 - protein, 12 aa, Artificial Sequence
  Description of Artificial Sequence: Synthetic peptide
RASQSVSSSQLA

SEQ ID NO: 2153 - protein, 7 aa, Artificial Sequence
  Description of Artificial Sequence: Synthetic peptide
GASNRAT

SEQ ID NO: 2154 - protein, 9 aa, Artificial Sequence
  Description of Artificial Sequence: Synthetic peptide
QQRSNWPVT

SEQ ID NO: 2155 - protein, 5 aa, Artificial Sequence
  Description of Artificial Sequence: Synthetic peptide
QYPMW

SEQ ID NO: 2156 - protein, 17 aa, Artificial Sequence
  Description of Artificial Sequence: Synthetic peptide
YIVPSGGRTYYADSVKG

SEQ ID NO: 2157 - protein, 15 aa, Artificial Sequence
  Description of Artificial Sequence: Synthetic peptide
DRAYGDYVGWNGFDY

SEQ ID NO: 2158 - protein, 12 aa, Artificial Sequence
  Description of Artificial Sequence: Synthetic peptide
RASQSVSSSQLA

SEQ ID NO: 2159 - protein, 7 aa, Artificial Sequence
  Description of Artificial Sequence: Synthetic peptide
GASSRAT

SEQ ID NO: 2160 - protein, 9 aa, Artificial Sequence
  Description of Artificial Sequence: Synthetic peptide
QQRGNWPIT

SEQ ID NO: 2161 - protein, 5 aa, Artificial Sequence
  Description of Artificial Sequence: Synthetic peptide
QYPMW

SEQ ID NO: 2162 - protein, 17 aa, Artificial Sequence
  Description of Artificial Sequence: Synthetic peptide
YIVPSGGRTYYADSVKG

SEQ ID NO: 2163 - protein, 15 aa, Artificial Sequence
  Description of Artificial Sequence: Synthetic peptide
DRAYGDYVGWNGFDY

SEQ ID NO: 2164 - protein, 12 aa, Artificial Sequence
  Description of Artificial Sequence: Synthetic peptide
RASQSVSSSQLA

SEQ ID NO: 2165 - protein, 7 aa, Artificial Sequence
  Description of Artificial Sequence: Synthetic peptide
GASNRAT

SEQ ID NO: 2166 - protein, 9 aa, Artificial Sequence
  Description of Artificial Sequence: Synthetic peptide
QQRSNWPVT

SEQ ID NO: 2167 - protein, 5 aa, Artificial Sequence
  Description of Artificial Sequence: Synthetic peptide
QYPMW

SEQ ID NO: 2168 - protein, 17 aa, Artificial Sequence
  Description of Artificial Sequence: Synthetic peptide
YIVPSGGRTYYADSVKG

SEQ ID NO: 2169 - protein, 15 aa, Artificial Sequence
  Description of Artificial Sequence: Synthetic peptide
DRAYGDYVGWNGFDY

SEQ ID NO: 2170 - protein, 12 aa, Artificial Sequence
  Description of Artificial Sequence: Synthetic peptide
RASQSVSSSYLA

SEQ ID NO: 2171 - protein, 7 aa, Artificial Sequence
  Description of Artificial Sequence: Synthetic peptide
DASSRAT

SEQ ID NO: 2172 - protein, 9 aa, Artificial Sequence
  Description of Artificial Sequence: Synthetic peptide
QQRHTWPIT

SEQ ID NO: 2173 - protein, 5 aa, Artificial Sequence
  Description of Artificial Sequence: Synthetic peptide
QYPMW

SEQ ID NO: 2174 - protein, 17 aa, Artificial Sequence
  Description of Artificial Sequence: Synthetic peptide
YIVPSGGRTYYADSVKG

SEQ ID NO: 2175 - protein, 15 aa, Artificial Sequence
  Description of Artificial Sequence: Synthetic peptide
DRAYGDYVGWNGFDY

SEQ ID NO: 2176 - protein, 11 aa, Artificial Sequence
  Description of Artificial Sequence: Synthetic peptide
RASQSVDNHLA

SEQ ID NO: 2177 - protein, 7 aa, Artificial Sequence
  Description of Artificial Sequence: Synthetic peptide
GASTRAT

SEQ ID NO: 2178 - protein, 9 aa, Artificial Sequence
  Description of Artificial Sequence: Synthetic peptide
QQRRKWPVT

SEQ ID NO: 2179 - protein, 5 aa, Artificial Sequence
  Description of Artificial Sequence: Synthetic peptide
QYPMW

SEQ ID NO: 2180 - protein, 17 aa, Artificial Sequence
  Description of Artificial Sequence: Synthetic peptide
YIVPSGGRTYYADSVKG

SEQ ID NO: 2181 - protein, 15 aa, Artificial Sequence
  Description of Artificial Sequence: Synthetic peptide
DRAYGDYVGWNGFDY

SEQ ID NO: 2182 - protein, 11 aa, Artificial Sequence
  Description of Artificial Sequence: Synthetic peptide
RASQPVGSYLA

SEQ ID NO: 2183 - protein, 7 aa, Artificial Sequence
  Description of Artificial Sequence: Synthetic peptide
GASNRAT

SEQ ID NO: 2184 - protein, 9 aa, Artificial Sequence
  Description of Artificial Sequence: Synthetic peptide
QQRSNWPIT

SEQ ID NO: 2185 - protein, 5 aa, Artificial Sequence
  Description of Artificial Sequence: Synthetic peptide
QYPMW

SEQ ID NO: 2186 - protein, 17 aa, Artificial Sequence
  Description of Artificial Sequence: Synthetic peptide
YIVPSGGRTYYADSVKG

SEQ ID NO: 2187 - protein, 15 aa, Artificial Sequence
  Description of Artificial Sequence: Synthetic peptide
DRAYGDYVGWNGFDY

SEQ ID NO: 2188 - protein, 12 aa, Artificial Sequence
  Description of Artificial Sequence: Synthetic peptide
RASQSLGRSDLA

SEQ ID NO: 2189 - protein, 7 aa, Artificial Sequence
  Description of Artificial Sequence: Synthetic peptide
GVSNRAT

SEQ ID NO: 2190 - protein, 9 aa, Artificial Sequence
  Description of Artificial Sequence: Synthetic peptide
QQRSNWPVT

SEQ ID NO: 2191 - protein, 5 aa, Artificial Sequence
  Description of Artificial Sequence: Synthetic peptide
QYPMW

SEQ ID NO: 2192 - protein, 17 aa, Artificial Sequence
  Description of Artificial Sequence: Synthetic peptide
YIVPSGGRTYYADSVKG

SEQ ID NO: 2193 - protein, 15 aa, Artificial Sequence
  Description of Artificial Sequence: Synthetic peptide
DRAYGDYVGWNGFDY

SEQ ID NO: 2194 - protein, 11 aa, Artificial Sequence
  Description of Artificial Sequence: Synthetic peptide
RASQSVSLYLA

SEQ ID NO: 2195 - protein, 7 aa, Artificial Sequence
  Description of Artificial Sequence: Synthetic peptide
GASSRAT

SEQ ID NO: 2196 - protein, 9 aa, Artificial Sequence
  Description of Artificial Sequence: Synthetic peptide
QQRGSWPIT

SEQ ID NO: 2197 - protein, 5 aa, Artificial Sequence
  Description of Artificial Sequence: Synthetic peptide
QYPMW

SEQ ID NO: 2198 - protein, 17 aa, Artificial Sequence
  Description of Artificial Sequence: Synthetic peptide
YIVPSGGRTYYADSVKG

SEQ ID NO: 2199 - protein, 15 aa, Artificial Sequence
  Description of Artificial Sequence: Synthetic peptide
DRAYGDYVGWNGFDY

SEQ ID NO: 2200 - protein, 11 aa, Artificial Sequence
  Description of Artificial Sequence: Synthetic peptide
RASQDVNRYLA

SEQ ID NO: 2201 - protein, 7 aa, Artificial Sequence
  Description of Artificial Sequence: Synthetic peptide
GASTRAT

SEQ ID NO: 2202 - protein, 9 aa, Artificial Sequence
  Description of Artificial Sequence: Synthetic peptide
QQRSNWPIT

SEQ ID NO: 2203 - protein, 5 aa, Artificial Sequence
  Description of Artificial Sequence: Synthetic peptide
QYPMW

SEQ ID NO: 2204 - protein, 17 aa, Artificial Sequence
  Description of Artificial Sequence: Synthetic peptide
YIVPSGGRTYYADSVKG

SEQ ID NO: 2205 - protein, 15 aa, Artificial Sequence
  Description of Artificial Sequence: Synthetic peptide
DRAYGDYVGWNGFDY

SEQ ID NO: 2206 - protein, 11 aa, Artificial Sequence
  Description of Artificial Sequence: Synthetic peptide
RASQSLNSDLA

SEQ ID NO: 2207 - protein, 7 aa, Artificial Sequence
  Description of Artificial Sequence: Synthetic peptide
GASTRAT

SEQ ID NO: 2208 - protein, 9 aa, Artificial Sequence
  Description of Artificial Sequence: Synthetic peptide
QQRRNWPIT

SEQ ID NO: 2209 - protein, 5 aa, Artificial Sequence
  Description of Artificial Sequence: Synthetic peptide
QYPMW

SEQ ID NO: 2210 - protein, 17 aa, Artificial Sequence
  Description of Artificial Sequence: Synthetic peptide
YIVPSGGRTYYADSVKG

SEQ ID NO: 2211 - protein, 15 aa, Artificial Sequence
  Description of Artificial Sequence: Synthetic peptide
DRAYGDYVGWNGFDY

SEQ ID NO: 2212 - protein, 11 aa, Artificial Sequence
  Description of Artificial Sequence: Synthetic peptide
RASQSVGSDLA

SEQ ID NO: 2213 - protein, 5 aa, Artificial Sequence
  Description of Artificial Sequence: Synthetic peptide
GASTR

SEQ ID NO: 2214 - protein, 9 aa, Artificial Sequence
  Description of Artificial Sequence: Synthetic peptide
QQRGNWPIT

SEQ ID NO: 2215 - protein, 5 aa, Artificial Sequence
  Description of Artificial Sequence: Synthetic peptide
QYPMW

SEQ ID NO: 2216 - protein, 17 aa, Artificial Sequence
  Description of Artificial Sequence: Synthetic peptide
YIVPSGGRTYYADSVKG

SEQ ID NO: 2217 - protein, 15 aa, Artificial Sequence
  Description of Artificial Sequence: Synthetic peptide
DRAYGDYVGWNGFDY

SEQ ID NO: 2218 - protein, 11 aa, Artificial Sequence
  Description of Artificial Sequence: Synthetic peptide
RASQSVSSNLA

SEQ ID NO: 2219 - protein, 7 aa, Artificial Sequence
  Description of Artificial Sequence: Synthetic peptide
GASTRAT

SEQ ID NO: 2220 - protein, 9 aa, Artificial Sequence
  Description of Artificial Sequence: Synthetic peptide
QQRGFWPIT

SEQ ID NO: 2221 - protein, 5 aa, Artificial Sequence
  Description of Artificial Sequence: Synthetic peptide
QYPMW

SEQ ID NO: 2222 - protein, 17 aa, Artificial Sequence
  Description of Artificial Sequence: Synthetic peptide
YIVPSGGRTYYADSVKG

SEQ ID NO: 2223 - protein, 15 aa, Artificial Sequence
  Description of Artificial Sequence: Synthetic peptide
DRAYGDYVGWNGFDY

SEQ ID NO: 2224 - protein, 12 aa, Artificial Sequence
  Description of Artificial Sequence: Synthetic peptide
RASQTVSSRLLA

SEQ ID NO: 2225 - protein, 7 aa, Artificial Sequence
  Description of Artificial Sequence: Synthetic peptide
AASIRAT

SEQ ID NO: 2226 - protein, 9 aa, Artificial Sequence
  Description of Artificial Sequence: Synthetic peptide
QQRRSWPPT

SEQ ID NO: 2227 - protein, 5 aa, Artificial Sequence
  Description of Artificial Sequence: Synthetic peptide
QYPMW

SEQ ID NO: 2228 - protein, 17 aa, Artificial Sequence
  Description of Artificial Sequence: Synthetic peptide
YIVPSGGRTYYADSVKG

SEQ ID NO: 2229 - protein, 15 aa, Artificial Sequence
  Description of Artificial Sequence: Synthetic peptide
DRAYGDYVGWNGFDY

SEQ ID NO: 2230 - protein, 11 aa, Artificial Sequence
  Description of Artificial Sequence: Synthetic peptide
RATQGIGTFLA

SEQ ID NO: 2231 - protein, 7 aa, Artificial Sequence
  Description of Artificial Sequence: Synthetic peptide
GASTLQS

SEQ ID NO: 2232 - protein, 9 aa, Artificial Sequence
  Description of Artificial Sequence: Synthetic peptide
QQRGNWPIT

SEQ ID NO: 2233 - protein, 5 aa, Artificial Sequence
  Description of Artificial Sequence: Synthetic peptide
QYPMW

SEQ ID NO: 2234 - protein, 17 aa, Artificial Sequence
  Description of Artificial Sequence: Synthetic peptide
YIVPSGGRTYYADSVKG

SEQ ID NO: 2235 - protein, 15 aa, Artificial Sequence
  Description of Artificial Sequence: Synthetic peptide
DRAYGDYVGWNGFDY

SEQ ID NO: 2236 - protein, 11 aa, Artificial Sequence
  Description of Artificial Sequence: Synthetic peptide
RATQGIGTFLA

SEQ ID NO: 2237 - protein, 7 aa, Artificial Sequence
  Description of Artificial Sequence: Synthetic peptide
GASTLQS

SEQ ID NO: 2238 - protein, 9 aa, Artificial Sequence
  Description of Artificial Sequence: Synthetic peptide
QQRGNWPIT

SEQ ID NO: 2239 - protein, 5 aa, Artificial Sequence
  Description of Artificial Sequence: Synthetic peptide
QYPMW

SEQ ID NO: 2240 - protein, 17 aa, Artificial Sequence
  Description of Artificial Sequence: Synthetic peptide
YIVPSGGRTYYADSVKG

SEQ ID NO: 2241 - protein, 15 aa, Artificial Sequence
  Description of Artificial Sequence: Synthetic peptide
DRAYGDYVGWNGFDY

SEQ ID NO: 2242 - protein, 11 aa, Artificial Sequence
  Description of Artificial Sequence: Synthetic peptide
RASQDISSYLA

SEQ ID NO: 2243 - protein, 7 aa, Artificial Sequence
  Description of Artificial Sequence: Synthetic peptide
GASTLQS

SEQ ID NO: 2244 - protein, 9 aa, Artificial Sequence
  Description of Artificial Sequence: Synthetic peptide
QQRGNWPIT

SEQ ID NO: 2245 - protein, 5 aa, Artificial Sequence
  Description of Artificial Sequence: Synthetic peptide
QYPMW

SEQ ID NO: 2246 - protein, 17 aa, Artificial Sequence
  Description of Artificial Sequence: Synthetic peptide
YIVPSGGRTYYADSVKG

SEQ ID NO: 2247 - protein, 15 aa, Artificial Sequence
  Description of Artificial Sequence: Synthetic peptide
DRAYGDYVGWNGFDY

SEQ ID NO: 2248 - protein, 11 aa, Artificial Sequence
  Description of Artificial Sequence: Synthetic peptide
RASQGISSYLA

SEQ ID NO: 2249 - protein, 7 aa, Artificial Sequence
  Description of Artificial Sequence: Synthetic peptide
AASTLQS

SEQ ID NO: 2250 - protein, 9 aa, Artificial Sequence
  Description of Artificial Sequence: Synthetic peptide
QQRSNWPPS

SEQ ID NO: 2251 - protein, 5 aa, Artificial Sequence
  Description of Artificial Sequence: Synthetic peptide
QYPMW

SEQ ID NO: 2252 - protein, 17 aa, Artificial Sequence
  Description of Artificial Sequence: Synthetic peptide
YIVPSGGRTYYADSVKG

SEQ ID NO: 2253 - protein, 15 aa, Artificial Sequence
  Description of Artificial Sequence: Synthetic peptide
DRAYGDYVGWNGFDY

SEQ ID NO: 2254 - protein, 11 aa, Artificial Sequence
  Description of Artificial Sequence: Synthetic peptide
RASQGIRNDVG

SEQ ID NO: 2255 - protein, 7 aa, Artificial Sequence
  Description of Artificial Sequence: Synthetic peptide
APSNLQS

SEQ ID NO: 2256 - protein, 9 aa, Artificial Sequence
  Description of Artificial Sequence: Synthetic peptide
LQDFDFPWT

SEQ ID NO: 2257 - protein, 5 aa, Artificial Sequence
  Description of Artificial Sequence: Synthetic peptide
QYPMW

SEQ ID NO: 2258 - protein, 17 aa, Artificial Sequence
  Description of Artificial Sequence: Synthetic peptide
YIVPSGGRTYYADSVKG

SEQ ID NO: 2259 - protein, 15 aa, Artificial Sequence
  Description of Artificial Sequence: Synthetic peptide
DRAYGDYVGWNGFDY

SEQ ID NO: 2260 - protein, 11 aa, Artificial Sequence
  Description of Artificial Sequence: Synthetic peptide
RASQSISSFLA

SEQ ID NO: 2261 - protein, 7 aa, Artificial Sequence
  Description of Artificial Sequence: Synthetic peptide
DASYRAT

SEQ ID NO: 2262 - protein, 9 aa, Artificial Sequence
  Description of Artificial Sequence: Synthetic peptide
QQRGNWPIT

SEQ ID NO: 2263 - protein, 5 aa, Artificial Sequence
  Description of Artificial Sequence: Synthetic peptide
QYPMW

SEQ ID NO: 2264 - protein, 17 aa, Artificial Sequence
  Description of Artificial Sequence: Synthetic peptide
YIVPSGGRTYYADSVKG

SEQ ID NO: 2265 - protein, 15 aa, Artificial Sequence
  Description of Artificial Sequence: Synthetic peptide
DRAYGDYVGWNGFDY

SEQ ID NO: 2266 - protein, 11 aa, Artificial Sequence
  Description of Artificial Sequence: Synthetic peptide
RASQSVNSDLA

SEQ ID NO: 2267 - protein, 7 aa, Artificial Sequence
  Description of Artificial Sequence: Synthetic peptide
AASTRAT

SEQ ID NO: 2268 - protein, 9 aa, Artificial Sequence
  Description of Artificial Sequence: Synthetic peptide
QQRRKWPVT

SEQ ID NO: 2269 - protein, 5 aa, Artificial Sequence
  Description of Artificial Sequence: Synthetic peptide
QYPMW

SEQ ID NO: 2270 - protein, 17 aa, Artificial Sequence
  Description of Artificial Sequence: Synthetic peptide
YIVPSGGRTYYADSVKG

SEQ ID NO: 2271 - protein, 15 aa, Artificial Sequence
  Description of Artificial Sequence: Synthetic peptide
DRAYGDYVGWNGFDY

SEQ ID NO: 2272 - protein, 11 aa, Artificial Sequence
  Description of Artificial Sequence: Synthetic peptide
RASQGISTWLA

SEQ ID NO: 2273 - protein, 7 aa, Artificial Sequence
  Description of Artificial Sequence: Synthetic peptide
GASNRAT

SEQ ID NO: 2274 - protein, 9 aa, Artificial Sequence
  Description of Artificial Sequence: Synthetic peptide
QQRGNWPIT

SEQ ID NO: 2275 - protein, 5 aa, Artificial Sequence
  Description of Artificial Sequence: Synthetic peptide
QYPMW

SEQ ID NO: 2276 - protein, 17 aa, Artificial Sequence
  Description of Artificial Sequence: Synthetic peptide
YIVPSGGRTYYADSVKG

SEQ ID NO: 2277 - protein, 15 aa, Artificial Sequence
  Description of Artificial Sequence: Synthetic peptide
DRAYGDYVGWNGFDY

SEQ ID NO: 2278 - protein, 11 aa, Artificial Sequence
  Description of Artificial Sequence: Synthetic peptide
RASQTISSWLA

SEQ ID NO: 2279 - protein, 7 aa, Artificial Sequence
  Description of Artificial Sequence: Synthetic peptide
KASSLQS

SEQ ID NO: 2280 - protein, 8 aa, Artificial Sequence
  Description of Artificial Sequence: Synthetic peptide
QQYSSWYT

SEQ ID NO: 2281 - protein, 5 aa, Artificial Sequence
  Description of Artificial Sequence: Synthetic peptide
QYPMW

SEQ ID NO: 2282 - protein, 17 aa, Artificial Sequence
  Description of Artificial Sequence: Synthetic peptide
YIVPSGGRTYYADSVKG

SEQ ID NO: 2283 - protein, 15 aa, Artificial Sequence
  Description of Artificial Sequence: Synthetic peptide
DRAYGDYVGWNGFDY

SEQ ID NO: 2284 - protein, 11 aa, Artificial Sequence
  Description of Artificial Sequence: Synthetic peptide
RASQNVHTYLA

SEQ ID NO: 2285 - protein, 7 aa, Artificial Sequence
  Description of Artificial Sequence: Synthetic peptide
EASNRAT

SEQ ID NO: 2286 - protein, 9 aa, Artificial Sequence
  Description of Artificial Sequence: Synthetic peptide
QQRGGWPIT

SEQ ID NO: 2287 - protein, 5 aa, Artificial Sequence
  Description of Artificial Sequence: Synthetic peptide
QYPMW

SEQ ID NO: 2288 - protein, 17 aa, Artificial Sequence
  Description of Artificial Sequence: Synthetic peptide
YIVPSGGRTYYADSVKG

SEQ ID NO: 2289 - protein, 15 aa, Artificial Sequence
  Description of Artificial Sequence: Synthetic peptide
DRAYGDYVGWNGFDY

SEQ ID NO: 2290 - protein, 11 aa, Artificial Sequence
  Description of Artificial Sequence: Synthetic peptide
RASQNIGSDLA

SEQ ID NO: 2291 - protein, 7 aa, Artificial Sequence
  Description of Artificial Sequence: Synthetic peptide
RASFRAT

SEQ ID NO: 2292 - protein, 9 aa, Artificial Sequence
  Description of Artificial Sequence: Synthetic peptide
QQRGFWPLT

SEQ ID NO: 2293 - protein, 5 aa, Artificial Sequence
  Description of Artificial Sequence: Synthetic peptide
QYPMW

SEQ ID NO: 2294 - protein, 17 aa, Artificial Sequence
  Description of Artificial Sequence: Synthetic peptide
YIVPSGGRTYYADSVKG

SEQ ID NO: 2295 - protein, 15 aa, Artificial Sequence
  Description of Artificial Sequence: Synthetic peptide
DRAYGDYVGWNGFDY

SEQ ID NO: 2296 - protein, 11 aa, Artificial Sequence
  Description of Artificial Sequence: Synthetic peptide
RASQSISSFLA

SEQ ID NO: 2297 - protein, 7 aa, Artificial Sequence
  Description of Artificial Sequence: Synthetic peptide
DASYRAT

SEQ ID NO: 2298 - protein, 9 aa, Artificial Sequence
  Description of Artificial Sequence: Synthetic peptide
QQRGNWPIT

SEQ ID NO: 2299 - protein, 5 aa, Artificial Sequence
  Description of Artificial Sequence: Synthetic peptide
TYPMW

SEQ ID NO: 2300 - protein, 17 aa, Artificial Sequence
  Description of Artificial Sequence: Synthetic peptide
YISSSGGGTYYADSVKG

SEQ ID NO: 2301 - protein, 15 aa, Artificial Sequence
  Description of Artificial Sequence: Synthetic peptide
DRAYGDYVGWNGFDY

SEQ ID NO: 2302 - protein, 11 aa, Artificial Sequence
  Description of Artificial Sequence: Synthetic peptide
RASQSISSFLA

SEQ ID NO: 2303 - protein, 7 aa, Artificial Sequence
  Description of Artificial Sequence: Synthetic peptide
DASYRAT

SEQ ID NO: 2304 - protein, 9 aa, Artificial Sequence
  Description of Artificial Sequence: Synthetic peptide
QQRGNWPIT

SEQ ID NO: 2305 - protein, 5 aa, Artificial Sequence
  Description of Artificial Sequence: Synthetic peptide
AYDMI

SEQ ID NO: 2306 - protein, 17 aa, Artificial Sequence
  Description of Artificial Sequence: Synthetic peptide
YIVPSGGFTDYADSVKG

SEQ ID NO: 2307 - protein, 15 aa, Artificial Sequence
  Description of Artificial Sequence: Synthetic peptide
DRAYGDYVGWNGFDY

SEQ ID NO: 2308 - protein, 11 aa, Artificial Sequence
  Description of Artificial Sequence: Synthetic peptide
RASQSISSFLA

SEQ ID NO: 2309 - protein, 7 aa, Artificial Sequence
  Description of Artificial Sequence: Synthetic peptide
DASYRAT

SEQ ID NO: 2310 - protein, 9 aa, Artificial Sequence
  Description of Artificial Sequence: Synthetic peptide
QQRGNWPIT

SEQ ID NO: 2311 - protein, 5 aa, Artificial Sequence
  Description of Artificial Sequence: Synthetic peptide
AYDMW

SEQ ID NO: 2312 - protein, 17 aa, Artificial Sequence
  Description of Artificial Sequence: Synthetic peptide
VIYPSGGTTFYADSVKG

SEQ ID NO: 2313 - protein, 15 aa, Artificial Sequence
  Description of Artificial Sequence: Synthetic peptide
DRAYGDYVGWNGFDY

SEQ ID NO: 2314 - protein, 11 aa, Artificial Sequence
  Description of Artificial Sequence: Synthetic peptide
RASQSISSFLA

SEQ ID NO: 2315 - protein, 7 aa, Artificial Sequence
  Description of Artificial Sequence: Synthetic peptide
DASYRAT

SEQ ID NO: 2316 - protein, 9 aa, Artificial Sequence
  Description of Artificial Sequence: Synthetic peptide
QQRGNWPIT

SEQ ID NO: 2317 - protein, 5 aa, Artificial Sequence
  Description of Artificial Sequence: Synthetic peptide
AYDMW

SEQ ID NO: 2318 - protein, 17 aa, Artificial Sequence
  Description of Artificial Sequence: Synthetic peptide
VIYSSGGMTLYADSVKG

SEQ ID NO: 2319 - protein, 15 aa, Artificial Sequence
  Description of Artificial Sequence: Synthetic peptide
DRAYGDYVGWNGFDY

SEQ ID NO: 2320 - protein, 11 aa, Artificial Sequence
  Description of Artificial Sequence: Synthetic peptide
RASQSISSFLA

SEQ ID NO: 2321 - protein, 7 aa, Artificial Sequence
  Description of Artificial Sequence: Synthetic peptide
DASYRAT

SEQ ID NO: 2322 - protein, 9 aa, Artificial Sequence
  Description of Artificial Sequence: Synthetic peptide
QQRGNWPIT

SEQ ID NO: 2323 - protein, 5 aa, Artificial Sequence
  Description of Artificial Sequence: Synthetic peptide
AYDMW

SEQ ID NO: 2324 - protein, 17 aa, Artificial Sequence
  Description of Artificial Sequence: Synthetic peptide
YISSSGGFTDYADSVKG

SEQ ID NO: 2325 - protein, 15 aa, Artificial Sequence
  Description of Artificial Sequence: Synthetic peptide
DRAYGDYVGWNGFDY

SEQ ID NO: 2326 - protein, 11 aa, Artificial Sequence
  Description of Artificial Sequence: Synthetic peptide
RASQSISSFLA

SEQ ID NO: 2327 - protein, 7 aa, Artificial Sequence
  Description of Artificial Sequence: Synthetic peptide
DASYRAT

SEQ ID NO: 2328 - protein, 9 aa, Artificial Sequence
  Description of Artificial Sequence: Synthetic peptide
QQRGNWPIT

SEQ ID NO: 2329 - protein, 5 aa, Artificial Sequence
  Description of Artificial Sequence: Synthetic peptide
AYEMW

SEQ ID NO: 2330 - protein, 17 aa, Artificial Sequence
  Description of Artificial Sequence: Synthetic peptide
SIYPSGGYTDYADSVKG

SEQ ID NO: 2331 - protein, 15 aa, Artificial Sequence
  Description of Artificial Sequence: Synthetic peptide
DRAYGDYVGWNGFDY

SEQ ID NO: 2332 - protein, 11 aa, Artificial Sequence
  Description of Artificial Sequence: Synthetic peptide
RASQSISSFLA

SEQ ID NO: 2333 - protein, 7 aa, Artificial Sequence
  Description of Artificial Sequence: Synthetic peptide
DASYRAT

SEQ ID NO: 2334 - protein, 9 aa, Artificial Sequence
  Description of Artificial Sequence: Synthetic peptide
QQRGNWPIT

SEQ ID NO: 2335 - protein, 5 aa, Artificial Sequence
  Description of Artificial Sequence: Synthetic peptide
AYEMW

SEQ ID NO: 2336 - protein, 17 aa, Artificial Sequence
  Description of Artificial Sequence: Synthetic peptide
VIYPSGGGTFYADSVKG

SEQ ID NO: 2337 - protein, 15 aa, Artificial Sequence
  Description of Artificial Sequence: Synthetic peptide
DRAYGDYVGWNGFDY

SEQ ID NO: 2338 - protein, 11 aa, Artificial Sequence
  Description of Artificial Sequence: Synthetic peptide
RASQSISSFLA

SEQ ID NO: 2339 - protein, 7 aa, Artificial Sequence
  Description of Artificial Sequence: Synthetic peptide
DASYRAT

SEQ ID NO: 2340 - protein, 9 aa, Artificial Sequence
  Description of Artificial Sequence: Synthetic peptide
QQRGNWPIT

SEQ ID NO: 2341 - protein, 5 aa, Artificial Sequence
  Description of Artificial Sequence: Synthetic peptide
AYMMW

SEQ ID NO: 2342 - protein, 17 aa, Artificial Sequence
  Description of Artificial Sequence: Synthetic peptide
AISPSGGYTGYADSVKG

SEQ ID NO: 2343 - protein, 15 aa, Artificial Sequence
  Description of Artificial Sequence: Synthetic peptide
DRAYGDYVGWNGFDY

SEQ ID NO: 2344 - protein, 11 aa, Artificial Sequence
  Description of Artificial Sequence: Synthetic peptide
RASQSISSFLA

SEQ ID NO: 2345 - protein, 7 aa, Artificial Sequence
  Description of Artificial Sequence: Synthetic peptide
DASYRAT

SEQ ID NO: 2346 - protein, 9 aa, Artificial Sequence
  Description of Artificial Sequence: Synthetic peptide
QQRGNWPIT

SEQ ID NO: 2347 - protein, 5 aa, Artificial Sequence
  Description of Artificial Sequence: Synthetic peptide
AYNMI

SEQ ID NO: 2348 - protein, 17 aa, Artificial Sequence
  Description of Artificial Sequence: Synthetic peptide
YIVPSGGFTGYADSVKG

SEQ ID NO: 2349 - protein, 15 aa, Artificial Sequence
  Description of Artificial Sequence: Synthetic peptide
DRAYGDYVGWNGFDY

SEQ ID NO: 2350 - protein, 11 aa, Artificial Sequence
  Description of Artificial Sequence: Synthetic peptide
RASQSISSFLA

SEQ ID NO: 2351 - protein, 7 aa, Artificial Sequence
  Description of Artificial Sequence: Synthetic peptide
DASYRAT

SEQ ID NO: 2352 - protein, 9 aa, Artificial Sequence
  Description of Artificial Sequence: Synthetic peptide
QQRGNWPIT

SEQ ID NO: 2353 - protein, 5 aa, Artificial Sequence
  Description of Artificial Sequence: Synthetic peptide
AYPMI

SEQ ID NO: 2354 - protein, 17 aa, Artificial Sequence
  Description of Artificial Sequence: Synthetic peptide
YIVPSGGATFYADSVKG

SEQ ID NO: 2355 - protein, 15 aa, Artificial Sequence
  Description of Artificial Sequence: Synthetic peptide
DRAYGDYVGWNGFDY

SEQ ID NO: 2356 - protein, 11 aa, Artificial Sequence
  Description of Artificial Sequence: Synthetic peptide
RASQSISSFLA

SEQ ID NO: 2357 - protein, 7 aa, Artificial Sequence
  Description of Artificial Sequence: Synthetic peptide
DASYRAT

SEQ ID NO: 2358 - protein, 9 aa, Artificial Sequence
  Description of Artificial Sequence: Synthetic peptide
QQRGNWPIT

SEQ ID NO: 2359 - protein, 5 aa, Artificial Sequence
  Description of Artificial Sequence: Synthetic peptide
AYPMM

SEQ ID NO: 2360 - protein, 17 aa, Artificial Sequence
  Description of Artificial Sequence: Synthetic peptide
YIYPSGGGTFYADSVKG

SEQ ID NO: 2361 - protein, 15 aa, Artificial Sequence
  Description of Artificial Sequence: Synthetic peptide
DRAYGDYVGWNGFDY

SEQ ID NO: 2362 - protein, 11 aa, Artificial Sequence
  Description of Artificial Sequence: Synthetic peptide
RASQSISSFLA

SEQ ID NO: 2363 - protein, 7 aa, Artificial Sequence
  Description of Artificial Sequence: Synthetic peptide
DASYRAT

SEQ ID NO: 2364 - protein, 9 aa, Artificial Sequence
  Description of Artificial Sequence: Synthetic peptide
QQRGNWPIT

SEQ ID NO: 2365 - protein, 5 aa, Artificial Sequence
  Description of Artificial Sequence: Synthetic peptide
AYPMW

SEQ ID NO: 2366 - protein, 17 aa, Artificial Sequence
  Description of Artificial Sequence: Synthetic peptide
YIVPSGGMTYYADSVKG

SEQ ID NO: 2367 - protein, 15 aa, Artificial Sequence
  Description of Artificial Sequence: Synthetic peptide
DRAYGDYVGWNGFDY

SEQ ID NO: 2368 - protein, 11 aa, Artificial Sequence
  Description of Artificial Sequence: Synthetic peptide
RASQSISSFLA

SEQ ID NO: 2369 - protein, 7 aa, Artificial Sequence
  Description of Artificial Sequence: Synthetic peptide
DASYRAT

SEQ ID NO: 2370 - protein, 9 aa, Artificial Sequence
  Description of Artificial Sequence: Synthetic peptide
QQRGNWPIT

SEQ ID NO: 2371 - protein, 5 aa, Artificial Sequence
  Description of Artificial Sequence: Synthetic peptide
AYPMW

SEQ ID NO: 2372 - protein, 17 aa, Artificial Sequence
  Description of Artificial Sequence: Synthetic peptide
YIYPSGGATFYADSVKG

SEQ ID NO: 2373 - protein, 15 aa, Artificial Sequence
  Description of Artificial Sequence: Synthetic peptide
DRAYGDYVGWNGFDY

SEQ ID NO: 2374 - protein, 11 aa, Artificial Sequence
  Description of Artificial Sequence: Synthetic peptide
RASQSISSFLA

SEQ ID NO: 2375 - protein, 7 aa, Artificial Sequence
  Description of Artificial Sequence: Synthetic peptide
DASYRAT

SEQ ID NO: 2376 - protein, 9 aa, Artificial Sequence
  Description of Artificial Sequence: Synthetic peptide
QQRGNWPIT

SEQ ID NO: 2377 - protein, 5 aa, Artificial Sequence
  Description of Artificial Sequence: Synthetic peptide
DYAMW

SEQ ID NO: 2378 - protein, 17 aa, Artificial Sequence
  Description of Artificial Sequence: Synthetic peptide
SIYPSGGATFYADSVKG

SEQ ID NO: 2379 - protein, 15 aa, Artificial Sequence
  Description of Artificial Sequence: Synthetic peptide
DRAYGDYVGWNGFDY

SEQ ID NO: 2380 - protein, 11 aa, Artificial Sequence
  Description of Artificial Sequence: Synthetic peptide
RASQSISSFLA

SEQ ID NO: 2381 - protein, 7 aa, Artificial Sequence
  Description of Artificial Sequence: Synthetic peptide
DASYRAT

SEQ ID NO: 2382 - protein, 9 aa, Artificial Sequence
  Description of Artificial Sequence: Synthetic peptide
QQRGNWPIT

SEQ ID NO: 2383 - protein, 5 aa, Artificial Sequence
  Description of Artificial Sequence: Synthetic peptide
DYAMW

SEQ ID NO: 2384 - protein, 17 aa, Artificial Sequence
  Description of Artificial Sequence: Synthetic peptide
WISPSGGGTLYADSVKG

SEQ ID NO: 2385 - protein, 15 aa, Artificial Sequence
  Description of Artificial Sequence: Synthetic peptide
DRAYGDYVGWNGFDY

SEQ ID NO: 2386 - protein, 11 aa, Artificial Sequence
  Description of Artificial Sequence: Synthetic peptide
RASQSISSFLA

SEQ ID NO: 2387 - protein, 7 aa, Artificial Sequence
  Description of Artificial Sequence: Synthetic peptide
DASYRAT

SEQ ID NO: 2388 - protein, 9 aa, Artificial Sequence
  Description of Artificial Sequence: Synthetic peptide
QQRGNWPIT

SEQ ID NO: 2389 - protein, 5 aa, Artificial Sequence
  Description of Artificial Sequence: Synthetic peptide
DYDMF

SEQ ID NO: 2390 - protein, 17 aa, Artificial Sequence
  Description of Artificial Sequence: Synthetic peptide
GIVSSGGYTGYADSVKG

SEQ ID NO: 2391 - protein, 15 aa, Artificial Sequence
  Description of Artificial Sequence: Synthetic peptide
DRAYGDYVGWNGFDY

SEQ ID NO: 2392 - protein, 11 aa, Artificial Sequence
  Description of Artificial Sequence: Synthetic peptide
RASQSISSFLA

SEQ ID NO: 2393 - protein, 7 aa, Artificial Sequence
  Description of Artificial Sequence: Synthetic peptide
DASYRAT

SEQ ID NO: 2394 - protein, 9 aa, Artificial Sequence
  Description of Artificial Sequence: Synthetic peptide
QQRGNWPIT

SEQ ID NO: 2395 - protein, 5 aa, Artificial Sequence
  Description of Artificial Sequence: Synthetic peptide
DYDMW

SEQ ID NO: 2396 - protein, 17 aa, Artificial Sequence
  Description of Artificial Sequence: Synthetic peptide
VISPSGGYTGYADSVKG

SEQ ID NO: 2397 - protein, 15 aa, Artificial Sequence
  Description of Artificial Sequence: Synthetic peptide
DRAYGDYVGWNGFDY

SEQ ID NO: 2398 - protein, 11 aa, Artificial Sequence
  Description of Artificial Sequence: Synthetic peptide
RASQSISSFLA

SEQ ID NO: 2399 - protein, 7 aa, Artificial Sequence
  Description of Artificial Sequence: Synthetic peptide
DASYRAT

SEQ ID NO: 2400 - protein, 9 aa, Artificial Sequence
  Description of Artificial Sequence: Synthetic peptide
QQRGNWPIT

SEQ ID NO: 2401 - protein, 5 aa, Artificial Sequence
  Description of Artificial Sequence: Synthetic peptide
DYDMW

SEQ ID NO: 2402 - protein, 17 aa, Artificial Sequence
  Description of Artificial Sequence: Synthetic peptide
VIYPSGGFTGYADSVKG

SEQ ID NO: 2403 - protein, 15 aa, Artificial Sequence
  Description of Artificial Sequence: Synthetic peptide
DRAYGDYVGWNGFDY

SEQ ID NO: 2404 - protein, 11 aa, Artificial Sequence
  Description of Artificial Sequence: Synthetic peptide
RASQSISSFLA

SEQ ID NO: 2405 - protein, 7 aa, Artificial Sequence
  Description of Artificial Sequence: Synthetic peptide
DASYRAT

SEQ ID NO: 2406 - protein, 9 aa, Artificial Sequence
  Description of Artificial Sequence: Synthetic peptide
QQRGNWPIT

SEQ ID NO: 2407 - protein, 5 aa, Artificial Sequence
  Description of Artificial Sequence: Synthetic peptide
DYDMW

SEQ ID NO: 2408 - protein, 16 aa, Artificial Sequence
  Description of Artificial Sequence: Synthetic peptide
VIYSGGSTYYADSVKG

SEQ ID NO: 2409 - protein, 15 aa, Artificial Sequence
  Description of Artificial Sequence: Synthetic peptide
DRAYGDYVGWNGFDY

SEQ ID NO: 2410 - protein, 11 aa, Artificial Sequence
  Description of Artificial Sequence: Synthetic peptide
RASQSISSFLA

SEQ ID NO: 2411 - protein, 7 aa, Artificial Sequence
  Description of Artificial Sequence: Synthetic peptide
DASYRAT

SEQ ID NO: 2412 - protein, 9 aa, Artificial Sequence
  Description of Artificial Sequence: Synthetic peptide
QQRGNWPIT

SEQ ID NO: 2413 - protein, 5 aa, Artificial Sequence
  Description of Artificial Sequence: Synthetic peptide
DYDMW

SEQ ID NO: 2414 - protein, 17 aa, Artificial Sequence
  Description of Artificial Sequence: Synthetic peptide
VIYSSGGFTSYADSVKG

SEQ ID NO: 2415 - protein, 15 aa, Artificial Sequence
  Description of Artificial Sequence: Synthetic peptide
DRAYGDYVGWNGFDY

SEQ ID NO: 2416 - protein, 11 aa, Artificial Sequence
  Description of Artificial Sequence: Synthetic peptide
RASQSISSFLA

SEQ ID NO: 2417 - protein, 7 aa, Artificial Sequence
  Description of Artificial Sequence: Synthetic peptide
DASYRAT

SEQ ID NO: 2418 - protein, 9 aa, Artificial Sequence
  Description of Artificial Sequence: Synthetic peptide
QQRGNWPIT

SEQ ID NO: 2419 - protein, 5 aa, Artificial Sequence
  Description of Artificial Sequence: Synthetic peptide
DYDMW

SEQ ID NO: 2420 - protein, 17 aa, Artificial Sequence
  Description of Artificial Sequence: Synthetic peptide
VIYSSGGMTYYADSVKG

SEQ ID NO: 2421 - protein, 15 aa, Artificial Sequence
  Description of Artificial Sequence: Synthetic peptide
DRAYGDYVGWNGFDY

SEQ ID NO: 2422 - protein, 11 aa, Artificial Sequence
  Description of Artificial Sequence: Synthetic peptide
RASQSISSFLA

SEQ ID NO: 2423 - protein, 7 aa, Artificial Sequence
  Description of Artificial Sequence: Synthetic peptide
DASYRAT

SEQ ID NO: 2424 - protein, 9 aa, Artificial Sequence
  Description of Artificial Sequence: Synthetic peptide
QQRGNWPIT

SEQ ID NO: 2425 - protein, 5 aa, Artificial Sequence
  Description of Artificial Sequence: Synthetic peptide
DYMMW

SEQ ID NO: 2426 - protein, 17 aa, Artificial Sequence
  Description of Artificial Sequence: Synthetic peptide
SISPSGGFTDYADSVKG

SEQ ID NO: 2427 - protein, 15 aa, Artificial Sequence
  Description of Artificial Sequence: Synthetic peptide
DRAYGDYVGWNGFDY

SEQ ID NO: 2428 - protein, 11 aa, Artificial Sequence
  Description of Artificial Sequence: Synthetic peptide
RASQSISSFLA

SEQ ID NO: 2429 - protein, 7 aa, Artificial Sequence
  Description of Artificial Sequence: Synthetic peptide
DASYRAT

SEQ ID NO: 2430 - protein, 9 aa, Artificial Sequence
  Description of Artificial Sequence: Synthetic peptide
QQRGNWPIT

SEQ ID NO: 2431 - protein, 5 aa, Artificial Sequence
  Description of Artificial Sequence: Synthetic peptide
DYNMW

SEQ ID NO: 2432 - protein, 17 aa, Artificial Sequence
  Description of Artificial Sequence: Synthetic peptide
VIYPSGGWTMYADSVKG

SEQ ID NO: 2433 - protein, 15 aa, Artificial Sequence
  Description of Artificial Sequence: Synthetic peptide
DRAYGDYVGWNGFDY

SEQ ID NO: 2434 - protein, 11 aa, Artificial Sequence
  Description of Artificial Sequence: Synthetic peptide
RASQSISSFLA

SEQ ID NO: 2435 - protein, 7 aa, Artificial Sequence
  Description of Artificial Sequence: Synthetic peptide
DASYRAT

SEQ ID NO: 2436 - protein, 9 aa, Artificial Sequence
  Description of Artificial Sequence: Synthetic peptide
QQRGNWPIT

SEQ ID NO: 2437 - protein, 5 aa, Artificial Sequence
  Description of Artificial Sequence: Synthetic peptide
DYPMF

SEQ ID NO: 2438 - protein, 17 aa, Artificial Sequence
  Description of Artificial Sequence: Synthetic peptide
YIVPSGGWTDYADSVKG

SEQ ID NO: 2439 - protein, 15 aa, Artificial Sequence
  Description of Artificial Sequence: Synthetic peptide
DRAYGDYVGWNGFDY

SEQ ID NO: 2440 - protein, 11 aa, Artificial Sequence
  Description of Artificial Sequence: Synthetic peptide
RASQSISSFLA

SEQ ID NO: 2441 - protein, 7 aa, Artificial Sequence
  Description of Artificial Sequence: Synthetic peptide
DASYRAT

SEQ ID NO: 2442 - protein, 9 aa, Artificial Sequence
  Description of Artificial Sequence: Synthetic peptide
QQRGNWPIT

SEQ ID NO: 2443 - protein, 5 aa, Artificial Sequence
  Description of Artificial Sequence: Synthetic peptide
DYPMF

SEQ ID NO: 2444 - protein, 17 aa, Artificial Sequence
  Description of Artificial Sequence: Synthetic peptide
YIVPSGGWTSYADSVKG

SEQ ID NO: 2445 - protein, 15 aa, Artificial Sequence
  Description of Artificial Sequence: Synthetic peptide
DRAYGDYVGWNGFDY

SEQ ID NO: 2446 - protein, 11 aa, Artificial Sequence
  Description of Artificial Sequence: Synthetic peptide
RASQSISSFLA

SEQ ID NO: 2447 - protein, 7 aa, Artificial Sequence
  Description of Artificial Sequence: Synthetic peptide
DASYRAT

SEQ ID NO: 2448 - protein, 9 aa, Artificial Sequence
  Description of Artificial Sequence: Synthetic peptide
QQRGNWPIT

SEQ ID NO: 2449 - protein, 5 aa, Artificial Sequence
  Description of Artificial Sequence: Synthetic peptide
DYPMI

SEQ ID NO: 2450 - protein, 17 aa, Artificial Sequence
  Description of Artificial Sequence: Synthetic peptide
YISPSGGYTDYADSVKG

SEQ ID NO: 2451 - protein, 15 aa, Artificial Sequence
  Description of Artificial Sequence: Synthetic peptide
DRAYGDYVGWNGFDY

SEQ ID NO: 2452 - protein, 11 aa, Artificial Sequence
  Description of Artificial Sequence: Synthetic peptide
RASQSISSFLA

SEQ ID NO: 2453 - protein, 7 aa, Artificial Sequence
  Description of Artificial Sequence: Synthetic peptide
DASYRAT

SEQ ID NO: 2454 - protein, 9 aa, Artificial Sequence
  Description of Artificial Sequence: Synthetic peptide
QQRGNWPIT

SEQ ID NO: 2455 - protein, 5 aa, Artificial Sequence
  Description of Artificial Sequence: Synthetic peptide
DYPMI

SEQ ID NO: 2456 - protein, 17 aa, Artificial Sequence
  Description of Artificial Sequence: Synthetic peptide
YIVPSGGWTDYADSVKG

SEQ ID NO: 2457 - protein, 15 aa, Artificial Sequence
  Description of Artificial Sequence: Synthetic peptide
DRAYGDYVGWNGFDY

SEQ ID NO: 2458 - protein, 11 aa, Artificial Sequence
  Description of Artificial Sequence: Synthetic peptide
RASQSISSFLA

SEQ ID NO: 2459 - protein, 7 aa, Artificial Sequence
  Description of Artificial Sequence: Synthetic peptide
DASYRAT

SEQ ID NO: 2460 - protein, 9 aa, Artificial Sequence
  Description of Artificial Sequence: Synthetic peptide
QQRGNWPIT

SEQ ID NO: 2461 - protein, 5 aa, Artificial Sequence
  Description of Artificial Sequence: Synthetic peptide
DYPMI

SEQ ID NO: 2462 - protein, 17 aa, Artificial Sequence
  Description of Artificial Sequence: Synthetic peptide
YIYPSGGGTYYADSVKG

SEQ ID NO: 2463 - protein, 15 aa, Artificial Sequence
  Description of Artificial Sequence: Synthetic peptide
DRAYGDYVGWNGFDY

SEQ ID NO: 2464 - protein, 11 aa, Artificial Sequence
  Description of Artificial Sequence: Synthetic peptide
RASQSISSFLA

SEQ ID NO: 2465 - protein, 7 aa, Artificial Sequence
  Description of Artificial Sequence: Synthetic peptide
DASYRAT

SEQ ID NO: 2466 - protein, 9 aa, Artificial Sequence
  Description of Artificial Sequence: Synthetic peptide
QQRGNWPIT

SEQ ID NO: 2467 - protein, 5 aa, Artificial Sequence
  Description of Artificial Sequence: Synthetic peptide
DYPMW

SEQ ID NO: 2468 - protein, 17 aa, Artificial Sequence
  Description of Artificial Sequence: Synthetic peptide
YISSSGGWTSYADSVKG

SEQ ID NO: 2469 - protein, 15 aa, Artificial Sequence
  Description of Artificial Sequence: Synthetic peptide
DRAYGDYVGWNGFDY

SEQ ID NO: 2470 - protein, 11 aa, Artificial Sequence
  Description of Artificial Sequence: Synthetic peptide
RASQSISSFLA

SEQ ID NO: 2471 - protein, 7 aa, Artificial Sequence
  Description of Artificial Sequence: Synthetic peptide
DASYRAT

SEQ ID NO: 2472 - protein, 9 aa, Artificial Sequence
  Description of Artificial Sequence: Synthetic peptide
QQRGNWPIT

SEQ ID NO: 2473 - protein, 5 aa, Artificial Sequence
  Description of Artificial Sequence: Synthetic peptide
DYPMW

SEQ ID NO: 2474 - protein, 17 aa, Artificial Sequence
  Description of Artificial Sequence: Synthetic peptide
YIYPSGGATYYADSVKG

SEQ ID NO: 2475 - protein, 15 aa, Artificial Sequence
  Description of Artificial Sequence: Synthetic peptide
DRAYGDYVGWNGFDY

SEQ ID NO: 2476 - protein, 11 aa, Artificial Sequence
  Description of Artificial Sequence: Synthetic peptide
RASQSISSFLA

SEQ ID NO: 2477 - protein, 7 aa, Artificial Sequence
  Description of Artificial Sequence: Synthetic peptide
DASYRAT

SEQ ID NO: 2478 - protein, 9 aa, Artificial Sequence
  Description of Artificial Sequence: Synthetic peptide
QQRGNWPIT

SEQ ID NO: 2479 - protein, 5 aa, Artificial Sequence
  Description of Artificial Sequence: Synthetic peptide
DYQMW

SEQ ID NO: 2480 - protein, 17 aa, Artificial Sequence
  Description of Artificial Sequence: Synthetic peptide
VIYPSGGATFYADSVKG

SEQ ID NO: 2481 - protein, 15 aa, Artificial Sequence
  Description of Artificial Sequence: Synthetic peptide
DRAYGDYVGWNGFDY

SEQ ID NO: 2482 - protein, 11 aa, Artificial Sequence
  Description of Artificial Sequence: Synthetic peptide
RASQSISSFLA

SEQ ID NO: 2483 - protein, 7 aa, Artificial Sequence
  Description of Artificial Sequence: Synthetic peptide
DASYRAT

SEQ ID NO: 2484 - protein, 9 aa, Artificial Sequence
  Description of Artificial Sequence: Synthetic peptide
QQRGNWPIT

SEQ ID NO: 2485 - protein, 5 aa, Artificial Sequence
  Description of Artificial Sequence: Synthetic peptide
EYDMW

SEQ ID NO: 2486 - protein, 17 aa, Artificial Sequence
  Description of Artificial Sequence: Synthetic peptide
VIYPSGGPTYYADSVKG

SEQ ID NO: 2487 - protein, 15 aa, Artificial Sequence
  Description of Artificial Sequence: Synthetic peptide
DRAYGDYVGWNGFDY

SEQ ID NO: 2488 - protein, 11 aa, Artificial Sequence
  Description of Artificial Sequence: Synthetic peptide
RASQSISSFLA

SEQ ID NO: 2489 - protein, 7 aa, Artificial Sequence
  Description of Artificial Sequence: Synthetic peptide
DASYRAT

SEQ ID NO: 2490 - protein, 9 aa, Artificial Sequence
  Description of Artificial Sequence: Synthetic peptide
QQRGNWPIT

SEQ ID NO: 2491 - protein, 5 aa, Artificial Sequence
  Description of Artificial Sequence: Synthetic peptide
EYDMW

SEQ ID NO: 2492 - protein, 17 aa, Artificial Sequence
  Description of Artificial Sequence: Synthetic peptide
VIYSSGGYTGYADSVKG

SEQ ID NO: 2493 - protein, 15 aa, Artificial Sequence
  Description of Artificial Sequence: Synthetic peptide
DRAYGDYVGWNGFDY

SEQ ID NO: 2494 - protein, 11 aa, Artificial Sequence
  Description of Artificial Sequence: Synthetic peptide
RASQSISSFLA

SEQ ID NO: 2495 - protein, 7 aa, Artificial Sequence
  Description of Artificial Sequence: Synthetic peptide
DASYRAT

SEQ ID NO: 2496 - protein, 9 aa, Artificial Sequence
  Description of Artificial Sequence: Synthetic peptide
QQRGNWPIT

SEQ ID NO: 2497 - protein, 5 aa, Artificial Sequence
  Description of Artificial Sequence: Synthetic peptide
EYEMW

SEQ ID NO: 2498 - protein, 17 aa, Artificial Sequence
  Description of Artificial Sequence: Synthetic peptide
VIYPSGGYTNYADSVKG

SEQ ID NO: 2499 - protein, 15 aa, Artificial Sequence
  Description of Artificial Sequence: Synthetic peptide
DRAYGDYVGWNGFDY

SEQ ID NO: 2500 - protein, 11 aa, Artificial Sequence
  Description of Artificial Sequence: Synthetic peptide
RASQSISSFLA

SEQ ID NO: 2501 - protein, 7 aa, Artificial Sequence
  Description of Artificial Sequence: Synthetic peptide
DASYRAT

SEQ ID NO: 2502 - protein, 9 aa, Artificial Sequence
  Description of Artificial Sequence: Synthetic peptide
QQRGNWPIT

SEQ ID NO: 2503 - protein, 5 aa, Artificial Sequence
  Description of Artificial Sequence: Synthetic peptide
EYNMW

SEQ ID NO: 2504 - protein, 17 aa, Artificial Sequence
  Description of Artificial Sequence: Synthetic peptide
VIYPSGGPTWYADSVKG

SEQ ID NO: 2505 - protein, 15 aa, Artificial Sequence
  Description of Artificial Sequence: Synthetic peptide
DRAYGDYVGWNGFDY

SEQ ID NO: 2506 - protein, 11 aa, Artificial Sequence
  Description of Artificial Sequence: Synthetic peptide
RASQSISSFLA

SEQ ID NO: 2507 - protein, 7 aa, Artificial Sequence
  Description of Artificial Sequence: Synthetic peptide
DASYRAT

SEQ ID NO: 2508 - protein, 9 aa, Artificial Sequence
  Description of Artificial Sequence: Synthetic peptide
QQRGNWPIT

SEQ ID NO: 2509 - protein, 5 aa, Artificial Sequence
  Description of Artificial Sequence: Synthetic peptide
EYPMF

SEQ ID NO: 2510 - protein, 17 aa, Artificial Sequence
  Description of Artificial Sequence: Synthetic peptide
YISPSGGWTSYADSVKG

SEQ ID NO: 2511 - protein, 15 aa, Artificial Sequence
  Description of Artificial Sequence: Synthetic peptide
DRAYGDYVGWNGFDY

SEQ ID NO: 2512 - protein, 11 aa, Artificial Sequence
  Description of Artificial Sequence: Synthetic peptide
RASQSISSFLA

SEQ ID NO: 2513 - protein, 7 aa, Artificial Sequence
  Description of Artificial Sequence: Synthetic peptide
DASYRAT

SEQ ID NO: 2514 - protein, 9 aa, Artificial Sequence
  Description of Artificial Sequence: Synthetic peptide
QQRGNWPIT

SEQ ID NO: 2515 - protein, 5 aa, Artificial Sequence
  Description of Artificial Sequence: Synthetic peptide
EYPMI

SEQ ID NO: 2516 - protein, 17 aa, Artificial Sequence
  Description of Artificial Sequence: Synthetic peptide
YISPSGGYTGYADSVKG

SEQ ID NO: 2517 - protein, 15 aa, Artificial Sequence
  Description of Artificial Sequence: Synthetic peptide
DRAYGDYVGWNGFDY

SEQ ID NO: 2518 - protein, 11 aa, Artificial Sequence
  Description of Artificial Sequence: Synthetic peptide
RASQSISSFLA

SEQ ID NO: 2519 - protein, 7 aa, Artificial Sequence
  Description of Artificial Sequence: Synthetic peptide
DASYRAT

SEQ ID NO: 2520 - protein, 9 aa, Artificial Sequence
  Description of Artificial Sequence: Synthetic peptide
QQRGNWPIT

SEQ ID NO: 2521 - protein, 5 aa, Artificial Sequence
  Description of Artificial Sequence: Synthetic peptide
EYPMW

SEQ ID NO: 2522 - protein, 17 aa, Artificial Sequence
  Description of Artificial Sequence: Synthetic peptide
SIYPSGGATFYADSVKG

SEQ ID NO: 2523 - protein, 15 aa, Artificial Sequence
  Description of Artificial Sequence: Synthetic peptide
DRAYGDYVGWNGFDY

SEQ ID NO: 2524 - protein, 11 aa, Artificial Sequence
  Description of Artificial Sequence: Synthetic peptide
RASQSISSFLA

SEQ ID NO: 2525 - protein, 7 aa, Artificial Sequence
  Description of Artificial Sequence: Synthetic peptide
DASYRAT

SEQ ID NO: 2526 - protein, 9 aa, Artificial Sequence
  Description of Artificial Sequence: Synthetic peptide
QQRGNWPIT

SEQ ID NO: 2527 - protein, 5 aa, Artificial Sequence
  Description of Artificial Sequence: Synthetic peptide
EYWMW

SEQ ID NO: 2528 - protein, 17 aa, Artificial Sequence
  Description of Artificial Sequence: Synthetic peptide
SISPSGGGTFYADSVKG

SEQ ID NO: 2529 - protein, 15 aa, Artificial Sequence
  Description of Artificial Sequence: Synthetic peptide
DRAYGDYVGWNGFDY

SEQ ID NO: 2530 - protein, 11 aa, Artificial Sequence
  Description of Artificial Sequence: Synthetic peptide
RASQSISSFLA

SEQ ID NO: 2531 - protein, 7 aa, Artificial Sequence
  Description of Artificial Sequence: Synthetic peptide
DASYRAT

SEQ ID NO: 2532 - protein, 9 aa, Artificial Sequence
  Description of Artificial Sequence: Synthetic peptide
QQRGNWPIT

SEQ ID NO: 2533 - protein, 5 aa, Artificial Sequence
  Description of Artificial Sequence: Synthetic peptide
FYDMF

SEQ ID NO: 2534 - protein, 17 aa, Artificial Sequence
  Description of Artificial Sequence: Synthetic peptide
VISSSGGGTFYADSVKG

SEQ ID NO: 2535 - protein, 15 aa, Artificial Sequence
  Description of Artificial Sequence: Synthetic peptide
DRAYGDYVGWNGFDY

SEQ ID NO: 2536 - protein, 11 aa, Artificial Sequence
  Description of Artificial Sequence: Synthetic peptide
RASQSISSFLA

SEQ ID NO: 2537 - protein, 7 aa, Artificial Sequence
  Description of Artificial Sequence: Synthetic peptide
DASYRAT

SEQ ID NO: 2538 - protein, 9 aa, Artificial Sequence
  Description of Artificial Sequence: Synthetic peptide
QQRGNWPIT

SEQ ID NO: 2539 - protein, 5 aa, Artificial Sequence
  Description of Artificial Sequence: Synthetic peptide
FYDML

SEQ ID NO: 2540 - protein, 17 aa, Artificial Sequence
  Description of Artificial Sequence: Synthetic peptide
YISSSGGFTGYADSVKG

SEQ ID NO: 2541 - protein, 15 aa, Artificial Sequence
  Description of Artificial Sequence: Synthetic peptide
DRAYGDYVGWNGFDY

SEQ ID NO: 2542 - protein, 11 aa, Artificial Sequence
  Description of Artificial Sequence: Synthetic peptide
RASQSISSFLA

SEQ ID NO: 2543 - protein, 7 aa, Artificial Sequence
  Description of Artificial Sequence: Synthetic peptide
DASYRAT

SEQ ID NO: 2544 - protein, 9 aa, Artificial Sequence
  Description of Artificial Sequence: Synthetic peptide
QQRGNWPIT

SEQ ID NO: 2545 - protein, 5 aa, Artificial Sequence
  Description of Artificial Sequence: Synthetic peptide
FYDMW

SEQ ID NO: 2546 - protein, 17 aa, Artificial Sequence
  Description of Artificial Sequence: Synthetic peptide
SIYSSGGATFYADSVKG

SEQ ID NO: 2547 - protein, 15 aa, Artificial Sequence
  Description of Artificial Sequence: Synthetic peptide
DRAYGDYVGWNGFDY

SEQ ID NO: 2548 - protein, 11 aa, Artificial Sequence
  Description of Artificial Sequence: Synthetic peptide
RASQSISSFLA

SEQ ID NO: 2549 - protein, 7 aa, Artificial Sequence
  Description of Artificial Sequence: Synthetic peptide
DASYRAT

SEQ ID NO: 2550 - protein, 9 aa, Artificial Sequence
  Description of Artificial Sequence: Synthetic peptide
QQRGNWPIT

SEQ ID NO: 2551 - protein, 5 aa, Artificial Sequence
  Description of Artificial Sequence: Synthetic peptide
FYDMW

SEQ ID NO: 2552 - protein, 17 aa, Artificial Sequence
  Description of Artificial Sequence: Synthetic peptide
VIYSSGGATFYADSVKG

SEQ ID NO: 2553 - protein, 15 aa, Artificial Sequence
  Description of Artificial Sequence: Synthetic peptide
DRAYGDYVGWNGFDY

SEQ ID NO: 2554 - protein, 11 aa, Artificial Sequence
  Description of Artificial Sequence: Synthetic peptide
RASQSISSFLA

SEQ ID NO: 2555 - protein, 7 aa, Artificial Sequence
  Description of Artificial Sequence: Synthetic peptide
DASYRAT

SEQ ID NO: 2556 - protein, 9 aa, Artificial Sequence
  Description of Artificial Sequence: Synthetic peptide
QQRGNWPIT

SEQ ID NO: 2557 - protein, 5 aa, Artificial Sequence
  Description of Artificial Sequence: Synthetic peptide
FYDMW

SEQ ID NO: 2558 - protein, 17 aa, Artificial Sequence
  Description of Artificial Sequence: Synthetic peptide
VIYSSGGFTDYADSVKG

SEQ ID NO: 2559 - protein, 15 aa, Artificial Sequence
  Description of Artificial Sequence: Synthetic peptide
DRAYGDYVGWNGFDY

SEQ ID NO: 2560 - protein, 11 aa, Artificial Sequence
  Description of Artificial Sequence: Synthetic peptide
RASQSISSFLA

SEQ ID NO: 2561 - protein, 7 aa, Artificial Sequence
  Description of Artificial Sequence: Synthetic peptide
DASYRAT

SEQ ID NO: 2562 - protein, 9 aa, Artificial Sequence
  Description of Artificial Sequence: Synthetic peptide
QQRGNWPIT

SEQ ID NO: 2563 - protein, 5 aa, Artificial Sequence
  Description of Artificial Sequence: Synthetic peptide
FYDMW

SEQ ID NO: 2564 - protein, 17 aa, Artificial Sequence
  Description of Artificial Sequence: Synthetic peptide
YISSSGGGTFYADSVKG

SEQ ID NO: 2565 - protein, 15 aa, Artificial Sequence
  Description of Artificial Sequence: Synthetic peptide
DRAYGDYVGWNGFDY

SEQ ID NO: 2566 - protein, 11 aa, Artificial Sequence
  Description of Artificial Sequence: Synthetic peptide
RASQSISSFLA

SEQ ID NO: 2567 - protein, 7 aa, Artificial Sequence
  Description of Artificial Sequence: Synthetic peptide
DASYRAT

SEQ ID NO: 2568 - protein, 9 aa, Artificial Sequence
  Description of Artificial Sequence: Synthetic peptide
QQRGNWPIT

SEQ ID NO: 2569 - protein, 5 aa, Artificial Sequence
  Description of Artificial Sequence: Synthetic peptide
FYDMY

SEQ ID NO: 2570 - protein, 17 aa, Artificial Sequence
  Description of Artificial Sequence: Synthetic peptide
SIVPSGGATFYADSVKG

SEQ ID NO: 2571 - protein, 15 aa, Artificial Sequence
  Description of Artificial Sequence: Synthetic peptide
DRAYGDYVGWNGFDY

SEQ ID NO: 2572 - protein, 11 aa, Artificial Sequence
  Description of Artificial Sequence: Synthetic peptide
RASQSISSFLA

SEQ ID NO: 2573 - protein, 7 aa, Artificial Sequence
  Description of Artificial Sequence: Synthetic peptide
DASYRAT

SEQ ID NO: 2574 - protein, 9 aa, Artificial Sequence
  Description of Artificial Sequence: Synthetic peptide
QQRGNWPIT

SEQ ID NO: 2575 - protein, 5 aa, Artificial Sequence
  Description of Artificial Sequence: Synthetic peptide
FYEMW

SEQ ID NO: 2576 - protein, 17 aa, Artificial Sequence
  Description of Artificial Sequence: Synthetic peptide
YISPSGGGTYYADSVKG

SEQ ID NO: 2577 - protein, 15 aa, Artificial Sequence
  Description of Artificial Sequence: Synthetic peptide
DRAYGDYVGWNGFDY

SEQ ID NO: 2578 - protein, 11 aa, Artificial Sequence
  Description of Artificial Sequence: Synthetic peptide
RASQSISSFLA

SEQ ID NO: 2579 - protein, 7 aa, Artificial Sequence
  Description of Artificial Sequence: Synthetic peptide
DASYRAT

SEQ ID NO: 2580 - protein, 9 aa, Artificial Sequence
  Description of Artificial Sequence: Synthetic peptide
QQRGNWPIT

SEQ ID NO: 2581 - protein, 5 aa, Artificial Sequence
  Description of Artificial Sequence: Synthetic peptide
FYHMI

SEQ ID NO: 2582 - protein, 16 aa, Artificial Sequence
  Description of Artificial Sequence: Synthetic peptide
YIYSSGGTFYADSVKG

SEQ ID NO: 2583 - protein, 15 aa, Artificial Sequence
  Description of Artificial Sequence: Synthetic peptide
DRAYGDYVGWNGFDY

SEQ ID NO: 2584 - protein, 11 aa, Artificial Sequence
  Description of Artificial Sequence: Synthetic peptide
RASQSISSFLA

SEQ ID NO: 2585 - protein, 7 aa, Artificial Sequence
  Description of Artificial Sequence: Synthetic peptide
DASYRAT

SEQ ID NO: 2586 - protein, 9 aa, Artificial Sequence
  Description of Artificial Sequence: Synthetic peptide
QQRGNWPIT

SEQ ID NO: 2587 - protein, 5 aa, Artificial Sequence
  Description of Artificial Sequence: Synthetic peptide
FYMMW

SEQ ID NO: 2588 - protein, 17 aa, Artificial Sequence
  Description of Artificial Sequence: Synthetic peptide
SISPSGGATFYADSVKG

SEQ ID NO: 2589 - protein, 15 aa, Artificial Sequence
  Description of Artificial Sequence: Synthetic peptide
DRAYGDYVGWNGFDY

SEQ ID NO: 2590 - protein, 11 aa, Artificial Sequence
  Description of Artificial Sequence: Synthetic peptide
RASQSISSFLA

SEQ ID NO: 2591 - protein, 7 aa, Artificial Sequence
  Description of Artificial Sequence: Synthetic peptide
DASYRAT

SEQ ID NO: 2592 - protein, 9 aa, Artificial Sequence
  Description of Artificial Sequence: Synthetic peptide
QQRGNWPIT

SEQ ID NO: 2593 - protein, 5 aa, Artificial Sequence
  Description of Artificial Sequence: Synthetic peptide
FYNMW

SEQ ID NO: 2594 - protein, 17 aa, Artificial Sequence
  Description of Artificial Sequence: Synthetic peptide
SISPSGGGTFYADSVKG

SEQ ID NO: 2595 - protein, 15 aa, Artificial Sequence
  Description of Artificial Sequence: Synthetic peptide
DRAYGDYVGWNGFDY

SEQ ID NO: 2596 - protein, 11 aa, Artificial Sequence
  Description of Artificial Sequence: Synthetic peptide
RASQSISSFLA

SEQ ID NO: 2597 - protein, 7 aa, Artificial Sequence
  Description of Artificial Sequence: Synthetic peptide
DASYRAT

SEQ ID NO: 2598 - protein, 9 aa, Artificial Sequence
  Description of Artificial Sequence: Synthetic peptide
QQRGNWPIT

SEQ ID NO: 2599 - protein, 5 aa, Artificial Sequence
  Description of Artificial Sequence: Synthetic peptide
FYNMW

SEQ ID NO: 2600 - protein, 17 aa, Artificial Sequence
  Description of Artificial Sequence: Synthetic peptide
VIYPSGGKTYYADSVKG

SEQ ID NO: 2601 - protein, 15 aa, Artificial Sequence
  Description of Artificial Sequence: Synthetic peptide
DRAYGDYVGWNGFDY

SEQ ID NO: 2602 - protein, 11 aa, Artificial Sequence
  Description of Artificial Sequence: Synthetic peptide
RASQSISSFLA

SEQ ID NO: 2603 - protein, 7 aa, Artificial Sequence
  Description of Artificial Sequence: Synthetic peptide
DASYRAT

SEQ ID NO: 2604 - protein, 9 aa, Artificial Sequence
  Description of Artificial Sequence: Synthetic peptide
QQRGNWPIT

SEQ ID NO: 2605 - protein, 5 aa, Artificial Sequence
  Description of Artificial Sequence: Synthetic peptide
FYNMW

SEQ ID NO: 2606 - protein, 17 aa, Artificial Sequence
  Description of Artificial Sequence: Synthetic peptide
VIYPSGGPTFYADSVKG

SEQ ID NO: 2607 - protein, 15 aa, Artificial Sequence
  Description of Artificial Sequence: Synthetic peptide
DRAYGDYVGWNGFDY

SEQ ID NO: 2608 - protein, 11 aa, Artificial Sequence
  Description of Artificial Sequence: Synthetic peptide
RASQSISSFLA

SEQ ID NO: 2609 - protein, 7 aa, Artificial Sequence
  Description of Artificial Sequence: Synthetic peptide
DASYRAT

SEQ ID NO: 2610 - protein, 9 aa, Artificial Sequence
  Description of Artificial Sequence: Synthetic peptide
QQRGNWPIT

SEQ ID NO: 2611 - protein, 5 aa, Artificial Sequence
  Description of Artificial Sequence: Synthetic peptide
FYPMI

SEQ ID NO: 2612 - protein, 17 aa, Artificial Sequence
  Description of Artificial Sequence: Synthetic peptide
YISPSGGSTLYADSVKG

SEQ ID NO: 2613 - protein, 15 aa, Artificial Sequence
  Description of Artificial Sequence: Synthetic peptide
DRAYGDYVGWNGFDY

SEQ ID NO: 2614 - protein, 11 aa, Artificial Sequence
  Description of Artificial Sequence: Synthetic peptide
RASQSISSFLA

SEQ ID NO: 2615 - protein, 7 aa, Artificial Sequence
  Description of Artificial Sequence: Synthetic peptide
DASYRAT

SEQ ID NO: 2616 - protein, 9 aa, Artificial Sequence
  Description of Artificial Sequence: Synthetic peptide
QQRGNWPIT

SEQ ID NO: 2617 - protein, 5 aa, Artificial Sequence
  Description of Artificial Sequence: Synthetic peptide
FYPMI

SEQ ID NO: 2618 - protein, 17 aa, Artificial Sequence
  Description of Artificial Sequence: Synthetic peptide
YISSSGGFTDYADSVKG

SEQ ID NO: 2619 - protein, 15 aa, Artificial Sequence
  Description of Artificial Sequence: Synthetic peptide
DRAYGDYVGWNGFDY

SEQ ID NO: 2620 - protein, 11 aa, Artificial Sequence
  Description of Artificial Sequence: Synthetic peptide
RASQSISSFLA

SEQ ID NO: 2621 - protein, 7 aa, Artificial Sequence
  Description of Artificial Sequence: Synthetic peptide
DASYRAT

SEQ ID NO: 2622 - protein, 9 aa, Artificial Sequence
  Description of Artificial Sequence: Synthetic peptide
QQRGNWPIT

SEQ ID NO: 2623 - protein, 5 aa, Artificial Sequence
  Description of Artificial Sequence: Synthetic peptide
FYPMI

SEQ ID NO: 2624 - protein, 17 aa, Artificial Sequence
  Description of Artificial Sequence: Synthetic peptide
YISSSGGYTSYADSVKG

SEQ ID NO: 2625 - protein, 15 aa, Artificial Sequence
  Description of Artificial Sequence: Synthetic peptide
DRAYGDYVGWNGFDY

SEQ ID NO: 2626 - protein, 11 aa, Artificial Sequence
  Description of Artificial Sequence: Synthetic peptide
RASQSISSFLA

SEQ ID NO: 2627 - protein, 7 aa, Artificial Sequence
  Description of Artificial Sequence: Synthetic peptide
DASYRAT

SEQ ID NO: 2628 - protein, 9 aa, Artificial Sequence
  Description of Artificial Sequence: Synthetic peptide
QQRGNWPIT

SEQ ID NO: 2629 - protein, 5 aa, Artificial Sequence
  Description of Artificial Sequence: Synthetic peptide
FYPML

SEQ ID NO: 2630 - protein, 15 aa, Artificial Sequence
  Description of Artificial Sequence: Synthetic peptide
YISGGYTGYADSVKG

SEQ ID NO: 2631 - protein, 15 aa, Artificial Sequence
  Description of Artificial Sequence: Synthetic peptide
DRAYGDYVGWNGFDY

SEQ ID NO: 2632 - protein, 11 aa, Artificial Sequence
  Description of Artificial Sequence: Synthetic peptide
RASQSISSFLA

SEQ ID NO: 2633 - protein, 7 aa, Artificial Sequence
  Description of Artificial Sequence: Synthetic peptide
DASYRAT

SEQ ID NO: 2634 - protein, 9 aa, Artificial Sequence
  Description of Artificial Sequence: Synthetic peptide
QQRGNWPIT

SEQ ID NO: 2635 - protein, 5 aa, Artificial Sequence
  Description of Artificial Sequence: Synthetic peptide
FYPMM

SEQ ID NO: 2636 - protein, 17 aa, Artificial Sequence
  Description of Artificial Sequence: Synthetic peptide
YISFSGGYTGYADSVKG

SEQ ID NO: 2637 - protein, 15 aa, Artificial Sequence
  Description of Artificial Sequence: Synthetic peptide
DRAYGDYVGWNGFDY

SEQ ID NO: 2638 - protein, 11 aa, Artificial Sequence
  Description of Artificial Sequence: Synthetic peptide
RASQSISSFLA

SEQ ID NO: 2639 - protein, 7 aa, Artificial Sequence
  Description of Artificial Sequence: Synthetic peptide
DASYRAT

SEQ ID NO: 2640 - protein, 9 aa, Artificial Sequence
  Description of Artificial Sequence: Synthetic peptide
QQRGNWPIT

SEQ ID NO: 2641 - protein, 5 aa, Artificial Sequence
  Description of Artificial Sequence: Synthetic peptide
FYPMW

SEQ ID NO: 2642 - protein, 17 aa, Artificial Sequence
  Description of Artificial Sequence: Synthetic peptide
YIYPSGGATFYADSVKG

SEQ ID NO: 2643 - protein, 15 aa, Artificial Sequence
  Description of Artificial Sequence: Synthetic peptide
DRAYGDYVGWNGFDY

SEQ ID NO: 2644 - protein, 11 aa, Artificial Sequence
  Description of Artificial Sequence: Synthetic peptide
RASQSISSFLA

SEQ ID NO: 2645 - protein, 7 aa, Artificial Sequence
  Description of Artificial Sequence: Synthetic peptide
DASYRAT

SEQ ID NO: 2646 - protein, 9 aa, Artificial Sequence
  Description of Artificial Sequence: Synthetic peptide
QQRGNWPIT

SEQ ID NO: 2647 - protein, 5 aa, Artificial Sequence
  Description of Artificial Sequence: Synthetic peptide
GYDMW

SEQ ID NO: 2648 - protein, 17 aa, Artificial Sequence
  Description of Artificial Sequence: Synthetic peptide
VISPSGGGTFYADSVKG

SEQ ID NO: 2649 - protein, 15 aa, Artificial Sequence
  Description of Artificial Sequence: Synthetic peptide
DRAYGDYVGWNGFDY

SEQ ID NO: 2650 - protein, 11 aa, Artificial Sequence
  Description of Artificial Sequence: Synthetic peptide
RASQSISSFLA

SEQ ID NO: 2651 - protein, 7 aa, Artificial Sequence
  Description of Artificial Sequence: Synthetic peptide
DASYRAT

SEQ ID NO: 2652 - protein, 9 aa, Artificial Sequence
  Description of Artificial Sequence: Synthetic peptide
QQRGNWPIT

SEQ ID NO: 2653 - protein, 5 aa, Artificial Sequence
  Description of Artificial Sequence: Synthetic peptide
GYDMW

SEQ ID NO: 2654 - protein, 17 aa, Artificial Sequence
  Description of Artificial Sequence: Synthetic peptide
VIYSSGGTTFYADSVKG

SEQ ID NO: 2655 - protein, 15 aa, Artificial Sequence
  Description of Artificial Sequence: Synthetic peptide
DRAYGDYVGWNGFDY

SEQ ID NO: 2656 - protein, 11 aa, Artificial Sequence
  Description of Artificial Sequence: Synthetic peptide
RASQSISSFLA

SEQ ID NO: 2657 - protein, 7 aa, Artificial Sequence
  Description of Artificial Sequence: Synthetic peptide
DASYRAT

SEQ ID NO: 2658 - protein, 9 aa, Artificial Sequence
  Description of Artificial Sequence: Synthetic peptide
QQRGNWPIT

SEQ ID NO: 2659 - protein, 5 aa, Artificial Sequence
  Description of Artificial Sequence: Synthetic peptide
GYNMW

SEQ ID NO: 2660 - protein, 17 aa, Artificial Sequence
  Description of Artificial Sequence: Synthetic peptide
VIYPSGGATFYADSVKG

SEQ ID NO: 2661 - protein, 15 aa, Artificial Sequence
  Description of Artificial Sequence: Synthetic peptide
DRAYGDYVGWNGFDY

SEQ ID NO: 2662 - protein, 11 aa, Artificial Sequence
  Description of Artificial Sequence: Synthetic peptide
RASQSISSFLA

SEQ ID NO: 2663 - protein, 7 aa, Artificial Sequence
  Description of Artificial Sequence: Synthetic peptide
DASYRAT

SEQ ID NO: 2664 - protein, 9 aa, Artificial Sequence
  Description of Artificial Sequence: Synthetic peptide
QQRGNWPIT

SEQ ID NO: 2665 - protein, 5 aa, Artificial Sequence
  Description of Artificial Sequence: Synthetic peptide
GYPMW

SEQ ID NO: 2666 - protein, 17 aa, Artificial Sequence
  Description of Artificial Sequence: Synthetic peptide
YISSSGGGTFYADSVKG

SEQ ID NO: 2667 - protein, 15 aa, Artificial Sequence
  Description of Artificial Sequence: Synthetic peptide
DRAYGDYVGWNGFDY

SEQ ID NO: 2668 - protein, 11 aa, Artificial Sequence
  Description of Artificial Sequence: Synthetic peptide
RASQSISSFLA

SEQ ID NO: 2669 - protein, 7 aa, Artificial Sequence
  Description of Artificial Sequence: Synthetic peptide
DASYRAT

SEQ ID NO: 2670 - protein, 9 aa, Artificial Sequence
  Description of Artificial Sequence: Synthetic peptide
QQRGNWPIT

SEQ ID NO: 2671 - protein, 5 aa, Artificial Sequence
  Description of Artificial Sequence: Synthetic peptide
HYAMI

SEQ ID NO: 2672 - protein, 17 aa, Artificial Sequence
  Description of Artificial Sequence: Synthetic peptide
YIVPSGGWTDYADSVKG

SEQ ID NO: 2673 - protein, 15 aa, Artificial Sequence
  Description of Artificial Sequence: Synthetic peptide
DRAYGDYVGWNGFDY

SEQ ID NO: 2674 - protein, 11 aa, Artificial Sequence
  Description of Artificial Sequence: Synthetic peptide
RASQSISSFLA

SEQ ID NO: 2675 - protein, 7 aa, Artificial Sequence
  Description of Artificial Sequence: Synthetic peptide
DASYRAT

SEQ ID NO: 2676 - protein, 9 aa, Artificial Sequence
  Description of Artificial Sequence: Synthetic peptide
QQRGNWPIT

SEQ ID NO: 2677 - protein, 5 aa, Artificial Sequence
  Description of Artificial Sequence: Synthetic peptide
HYAMI

SEQ ID NO: 2678 - protein, 17 aa, Artificial Sequence
  Description of Artificial Sequence: Synthetic peptide
YIVPSGGWTGYADSVKG

SEQ ID NO: 2679 - protein, 15 aa, Artificial Sequence
  Description of Artificial Sequence: Synthetic peptide
DRAYGDYVGWNGFDY

SEQ ID NO: 2680 - protein, 11 aa, Artificial Sequence
  Description of Artificial Sequence: Synthetic peptide
RASQSISSFLA

SEQ ID NO: 2681 - protein, 7 aa, Artificial Sequence
  Description of Artificial Sequence: Synthetic peptide
DASYRAT

SEQ ID NO: 2682 - protein, 9 aa, Artificial Sequence
  Description of Artificial Sequence: Synthetic peptide
QQRGNWPIT

SEQ ID NO: 2683 - protein, 5 aa, Artificial Sequence
  Description of Artificial Sequence: Synthetic peptide
HYDMW

SEQ ID NO: 2684 - protein, 17 aa, Artificial Sequence
  Description of Artificial Sequence: Synthetic peptide
SISPSGGATFYADSVKG

SEQ ID NO: 2685 - protein, 15 aa, Artificial Sequence
  Description of Artificial Sequence: Synthetic peptide
DRAYGDYVGWNGFDY

SEQ ID NO: 2686 - protein, 11 aa, Artificial Sequence
  Description of Artificial Sequence: Synthetic peptide
RASQSISSFLA

SEQ ID NO: 2687 - protein, 7 aa, Artificial Sequence
  Description of Artificial Sequence: Synthetic peptide
DASYRAT

SEQ ID NO: 2688 - protein, 9 aa, Artificial Sequence
  Description of Artificial Sequence: Synthetic peptide
QQRGNWPIT

SEQ ID NO: 2689 - protein, 5 aa, Artificial Sequence
  Description of Artificial Sequence: Synthetic peptide
HYDMW

SEQ ID NO: 2690 - protein, 16 aa, Artificial Sequence
  Description of Artificial Sequence: Synthetic peptide
VIVSSGKTFYADSVKG

SEQ ID NO: 2691 - protein, 15 aa, Artificial Sequence
  Description of Artificial Sequence: Synthetic peptide
DRAYGDYVGWNGFDY

SEQ ID NO: 2692 - protein, 11 aa, Artificial Sequence
  Description of Artificial Sequence: Synthetic peptide
RASQSISSFLA

SEQ ID NO: 2693 - protein, 7 aa, Artificial Sequence
  Description of Artificial Sequence: Synthetic peptide
DASYRAT

SEQ ID NO: 2694 - protein, 9 aa, Artificial Sequence
  Description of Artificial Sequence: Synthetic peptide
QQRGNWPIT

SEQ ID NO: 2695 - protein, 5 aa, Artificial Sequence
  Description of Artificial Sequence: Synthetic peptide
HYDMW

SEQ ID NO: 2696 - protein, 17 aa, Artificial Sequence
  Description of Artificial Sequence: Synthetic peptide
VIYPSGGFTDYADSVKG

SEQ ID NO: 2697 - protein, 15 aa, Artificial Sequence
  Description of Artificial Sequence: Synthetic peptide
DRAYGDYVGWNGFDY

SEQ ID NO: 2698 - protein, 11 aa, Artificial Sequence
  Description of Artificial Sequence: Synthetic peptide
RASQSISSFLA

SEQ ID NO: 2699 - protein, 7 aa, Artificial Sequence
  Description of Artificial Sequence: Synthetic peptide
DASYRAT

SEQ ID NO: 2700 - protein, 9 aa, Artificial Sequence
  Description of Artificial Sequence: Synthetic peptide
QQRGNWPIT

SEQ ID NO: 2701 - protein, 5 aa, Artificial Sequence
  Description of Artificial Sequence: Synthetic peptide
HYDMW

SEQ ID NO: 2702 - protein, 17 aa, Artificial Sequence
  Description of Artificial Sequence: Synthetic peptide
VIYPSGGHTLYADSVKG

SEQ ID NO: 2703 - protein, 15 aa, Artificial Sequence
  Description of Artificial Sequence: Synthetic peptide
DRAYGDYVGWNGFDY

SEQ ID NO: 2704 - protein, 11 aa, Artificial Sequence
  Description of Artificial Sequence: Synthetic peptide
RASQSISSFLA

SEQ ID NO: 2705 - protein, 7 aa, Artificial Sequence
  Description of Artificial Sequence: Synthetic peptide
DASYRAT

SEQ ID NO: 2706 - protein, 9 aa, Artificial Sequence
  Description of Artificial Sequence: Synthetic peptide
QQRGNWPIT

SEQ ID NO: 2707 - protein, 5 aa, Artificial Sequence
  Description of Artificial Sequence: Synthetic peptide
HYDMW

SEQ ID NO: 2708 - protein, 17 aa, Artificial Sequence
  Description of Artificial Sequence: Synthetic peptide
VIYPSGGPTYYADSVKG

SEQ ID NO: 2709 - protein, 15 aa, Artificial Sequence
  Description of Artificial Sequence: Synthetic peptide
DRAYGDYVGWNGFDY

SEQ ID NO: 2710 - protein, 11 aa, Artificial Sequence
  Description of Artificial Sequence: Synthetic peptide
RASQSISSFLA

SEQ ID NO: 2711 - protein, 7 aa, Artificial Sequence
  Description of Artificial Sequence: Synthetic peptide
DASYRAT

SEQ ID NO: 2712 - protein, 9 aa, Artificial Sequence
  Description of Artificial Sequence: Synthetic peptide
QQRGNWPIT

SEQ ID NO: 2713 - protein, 5 aa, Artificial Sequence
  Description of Artificial Sequence: Synthetic peptide
HYDMW

SEQ ID NO: 2714 - protein, 17 aa, Artificial Sequence
  Description of Artificial Sequence: Synthetic peptide
VIYPSGGVTYYADSVKG

SEQ ID NO: 2715 - protein, 15 aa, Artificial Sequence
  Description of Artificial Sequence: Synthetic peptide
DRAYGDYVGWNGFDY

SEQ ID NO: 2716 - protein, 11 aa, Artificial Sequence
  Description of Artificial Sequence: Synthetic peptide
RASQSISSFLA

SEQ ID NO: 2717 - protein, 7 aa, Artificial Sequence
  Description of Artificial Sequence: Synthetic peptide
DASYRAT

SEQ ID NO: 2718 - protein, 9 aa, Artificial Sequence
  Description of Artificial Sequence: Synthetic peptide
QQRGNWPIT

SEQ ID NO: 2719 - protein, 5 aa, Artificial Sequence
  Description of Artificial Sequence: Synthetic peptide
HYDMW

SEQ ID NO: 2720 - protein, 17 aa, Artificial Sequence
  Description of Artificial Sequence: Synthetic peptide
VIYSSGGFTGYADSVKG

SEQ ID NO: 2721 - protein, 15 aa, Artificial Sequence
  Description of Artificial Sequence: Synthetic peptide
DRAYGDYVGWNGFDY

SEQ ID NO: 2722 - protein, 11 aa, Artificial Sequence
  Description of Artificial Sequence: Synthetic peptide
RASQSISSFLA

SEQ ID NO: 2723 - protein, 7 aa, Artificial Sequence
  Description of Artificial Sequence: Synthetic peptide
DASYRAT

SEQ ID NO: 2724 - protein, 9 aa, Artificial Sequence
  Description of Artificial Sequence: Synthetic peptide
QQRGNWPIT

SEQ ID NO: 2725 - protein, 5 aa, Artificial Sequence
  Description of Artificial Sequence: Synthetic peptide
HYDMW

SEQ ID NO: 2726 - protein, 17 aa, Artificial Sequence
  Description of Artificial Sequence: Synthetic peptide
VIYSSGGPTYYADSVKG

SEQ ID NO: 2727 - protein, 15 aa, Artificial Sequence
  Description of Artificial Sequence: Synthetic peptide
DRAYGDYVGWNGFDY

SEQ ID NO: 2728 - protein, 11 aa, Artificial Sequence
  Description of Artificial Sequence: Synthetic peptide
RASQSISSFLA

SEQ ID NO: 2729 - protein, 7 aa, Artificial Sequence
  Description of Artificial Sequence: Synthetic peptide
DASYRAT

SEQ ID NO: 2730 - protein, 9 aa, Artificial Sequence
  Description of Artificial Sequence: Synthetic peptide
QQRGNWPIT

SEQ ID NO: 2731 - protein, 5 aa, Artificial Sequence
  Description of Artificial Sequence: Synthetic peptide
HYDMW

SEQ ID NO: 2732 - protein, 17 aa, Artificial Sequence
  Description of Artificial Sequence: Synthetic peptide
YISPSGGFTSYADSVKG

SEQ ID NO: 2733 - protein, 15 aa, Artificial Sequence
  Description of Artificial Sequence: Synthetic peptide
DRAYGDYVGWNGFDY

SEQ ID NO: 2734 - protein, 11 aa, Artificial Sequence
  Description of Artificial Sequence: Synthetic peptide
RASQSISSFLA

SEQ ID NO: 2735 - protein, 7 aa, Artificial Sequence
  Description of Artificial Sequence: Synthetic peptide
DASYRAT

SEQ ID NO: 2736 - protein, 9 aa, Artificial Sequence
  Description of Artificial Sequence: Synthetic peptide
QQRGNWPIT

SEQ ID NO: 2737 - protein, 5 aa, Artificial Sequence
  Description of Artificial Sequence: Synthetic peptide
HYEMW

SEQ ID NO: 2738 - protein, 17 aa, Artificial Sequence
  Description of Artificial Sequence: Synthetic peptide
SISSSGGGTFYADSVKG

SEQ ID NO: 2739 - protein, 15 aa, Artificial Sequence
  Description of Artificial Sequence: Synthetic peptide
DRAYGDYVGWNGFDY

SEQ ID NO: 2740 - protein, 11 aa, Artificial Sequence
  Description of Artificial Sequence: Synthetic peptide
RASQSISSFLA

SEQ ID NO: 2741 - protein, 7 aa, Artificial Sequence
  Description of Artificial Sequence: Synthetic peptide
DASYRAT

SEQ ID NO: 2742 - protein, 9 aa, Artificial Sequence
  Description of Artificial Sequence: Synthetic peptide
QQRGNWPIT

SEQ ID NO: 2743 - protein, 5 aa, Artificial Sequence
  Description of Artificial Sequence: Synthetic peptide
HYEMW

SEQ ID NO: 2744 - protein, 17 aa, Artificial Sequence
  Description of Artificial Sequence: Synthetic peptide
YIGSSGGSTYYADSVKG

SEQ ID NO: 2745 - protein, 15 aa, Artificial Sequence
  Description of Artificial Sequence: Synthetic peptide
DRAYGDYVGWNGFDY

SEQ ID NO: 2746 - protein, 11 aa, Artificial Sequence
  Description of Artificial Sequence: Synthetic peptide
RASQSISSFLA

SEQ ID NO: 2747 - protein, 7 aa, Artificial Sequence
  Description of Artificial Sequence: Synthetic peptide
DASYRAT

SEQ ID NO: 2748 - protein, 9 aa, Artificial Sequence
  Description of Artificial Sequence: Synthetic peptide
QQRGNWPIT

SEQ ID NO: 2749 - protein, 5 aa, Artificial Sequence
  Description of Artificial Sequence: Synthetic peptide
HYMMI

SEQ ID NO: 2750 - protein, 17 aa, Artificial Sequence
  Description of Artificial Sequence: Synthetic peptide
GISPSGGYTGYADSVKG

SEQ ID NO: 2751 - protein, 15 aa, Artificial Sequence
  Description of Artificial Sequence: Synthetic peptide
DRAYGDYVGWNGFDY

SEQ ID NO: 2752 - protein, 11 aa, Artificial Sequence
  Description of Artificial Sequence: Synthetic peptide
RASQSISSFLA

SEQ ID NO: 2753 - protein, 7 aa, Artificial Sequence
  Description of Artificial Sequence: Synthetic peptide
DASYRAT

SEQ ID NO: 2754 - protein, 9 aa, Artificial Sequence
  Description of Artificial Sequence: Synthetic peptide
QQRGNWPIT

SEQ ID NO: 2755 - protein, 5 aa, Artificial Sequence
  Description of Artificial Sequence: Synthetic peptide
HYMMW

SEQ ID NO: 2756 - protein, 17 aa, Artificial Sequence
  Description of Artificial Sequence: Synthetic peptide
SIYPSGGGTYYADSVKG

SEQ ID NO: 2757 - protein, 15 aa, Artificial Sequence
  Description of Artificial Sequence: Synthetic peptide
DRAYGDYVGWNGFDY

SEQ ID NO: 2758 - protein, 11 aa, Artificial Sequence
  Description of Artificial Sequence: Synthetic peptide
RASQSISSFLA

SEQ ID NO: 2759 - protein, 7 aa, Artificial Sequence
  Description of Artificial Sequence: Synthetic peptide
DASYRAT

SEQ ID NO: 2760 - protein, 9 aa, Artificial Sequence
  Description of Artificial Sequence: Synthetic peptide
QQRGNWPIT

SEQ ID NO: 2761 - protein, 5 aa, Artificial Sequence
  Description of Artificial Sequence: Synthetic peptide
HYMMW

SEQ ID NO: 2762 - protein, 16 aa, Artificial Sequence
  Description of Artificial Sequence: Synthetic peptide
SIYPSGGTYYADSVKG

SEQ ID NO: 2763 - protein, 15 aa, Artificial Sequence
  Description of Artificial Sequence: Synthetic peptide
DRAYGDYVGWNGFDY

SEQ ID NO: 2764 - protein, 11 aa, Artificial Sequence
  Description of Artificial Sequence: Synthetic peptide
RASQSISSFLA

SEQ ID NO: 2765 - protein, 7 aa, Artificial Sequence
  Description of Artificial Sequence: Synthetic peptide
DASYRAT

SEQ ID NO: 2766 - protein, 9 aa, Artificial Sequence
  Description of Artificial Sequence: Synthetic peptide
QQRGNWPIT

SEQ ID NO: 2767 - protein, 5 aa, Artificial Sequence
  Description of Artificial Sequence: Synthetic peptide
HYPMF

SEQ ID NO: 2768 - protein, 17 aa, Artificial Sequence
  Description of Artificial Sequence: Synthetic peptide
YISSSGGWTDYADSVKG

SEQ ID NO: 2769 - protein, 15 aa, Artificial Sequence
  Description of Artificial Sequence: Synthetic peptide
DRAYGDYVGWNGFDY

SEQ ID NO: 2770 - protein, 11 aa, Artificial Sequence
  Description of Artificial Sequence: Synthetic peptide
RASQSISSFLA

SEQ ID NO: 2771 - protein, 7 aa, Artificial Sequence
  Description of Artificial Sequence: Synthetic peptide
DASYRAT

SEQ ID NO: 2772 - protein, 9 aa, Artificial Sequence
  Description of Artificial Sequence: Synthetic peptide
QQRGNWPIT

SEQ ID NO: 2773 - protein, 5 aa, Artificial Sequence
  Description of Artificial Sequence: Synthetic peptide
HYPMI

SEQ ID NO: 2774 - protein, 17 aa, Artificial Sequence
  Description of Artificial Sequence: Synthetic peptide
YISPSGGGTFYADSVKG

SEQ ID NO: 2775 - protein, 15 aa, Artificial Sequence
  Description of Artificial Sequence: Synthetic peptide
DRAYGDYVGWNGFDY

SEQ ID NO: 2776 - protein, 11 aa, Artificial Sequence
  Description of Artificial Sequence: Synthetic peptide
RASQSISSFLA

SEQ ID NO: 2777 - protein, 7 aa, Artificial Sequence
  Description of Artificial Sequence: Synthetic peptide
DASYRAT

SEQ ID NO: 2778 - protein, 9 aa, Artificial Sequence
  Description of Artificial Sequence: Synthetic peptide
QQRGNWPIT

SEQ ID NO: 2779 - protein, 5 aa, Artificial Sequence
  Description of Artificial Sequence: Synthetic peptide
HYPMI

SEQ ID NO: 2780 - protein, 17 aa, Artificial Sequence
  Description of Artificial Sequence: Synthetic peptide
YISSSGGGTFYADSVKG

SEQ ID NO: 2781 - protein, 15 aa, Artificial Sequence
  Description of Artificial Sequence: Synthetic peptide
DRAYGDYVGWNGFDY

SEQ ID NO: 2782 - protein, 11 aa, Artificial Sequence
  Description of Artificial Sequence: Synthetic peptide
RASQSISSFLA

SEQ ID NO: 2783 - protein, 7 aa, Artificial Sequence
  Description of Artificial Sequence: Synthetic peptide
DASYRAT

SEQ ID NO: 2784 - protein, 9 aa, Artificial Sequence
  Description of Artificial Sequence: Synthetic peptide
QQRGNWPIT

SEQ ID NO: 2785 - protein, 5 aa, Artificial Sequence
  Description of Artificial Sequence: Synthetic peptide
HYPMI

SEQ ID NO: 2786 - protein, 17 aa, Artificial Sequence
  Description of Artificial Sequence: Synthetic peptide
YIYSSGGGTFYADSVKG

SEQ ID NO: 2787 - protein, 15 aa, Artificial Sequence
  Description of Artificial Sequence: Synthetic peptide
DRAYGDYVGWNGFDY

SEQ ID NO: 2788 - protein, 11 aa, Artificial Sequence
  Description of Artificial Sequence: Synthetic peptide
RASQSISSFLA

SEQ ID NO: 2789 - protein, 7 aa, Artificial Sequence
  Description of Artificial Sequence: Synthetic peptide
DASYRAT

SEQ ID NO: 2790 - protein, 9 aa, Artificial Sequence
  Description of Artificial Sequence: Synthetic peptide
QQRGNWPIT

SEQ ID NO: 2791 - protein, 5 aa, Artificial Sequence
  Description of Artificial Sequence: Synthetic peptide
HYPML

SEQ ID NO: 2792 - protein, 17 aa, Artificial Sequence
  Description of Artificial Sequence: Synthetic peptide
YIYPSGGGTFYADSVKG

SEQ ID NO: 2793 - protein, 15 aa, Artificial Sequence
  Description of Artificial Sequence: Synthetic peptide
DRAYGDYVGWNGFDY

SEQ ID NO: 2794 - protein, 11 aa, Artificial Sequence
  Description of Artificial Sequence: Synthetic peptide
RASQSISSFLA

SEQ ID NO: 2795 - protein, 7 aa, Artificial Sequence
  Description of Artificial Sequence: Synthetic peptide
DASYRAT

SEQ ID NO: 2796 - protein, 9 aa, Artificial Sequence
  Description of Artificial Sequence: Synthetic peptide
QQRGNWPIT

SEQ ID NO: 2797 - protein, 5 aa, Artificial Sequence
  Description of Artificial Sequence: Synthetic peptide
HYPMM

SEQ ID NO: 2798 - protein, 17 aa, Artificial Sequence
  Description of Artificial Sequence: Synthetic peptide
YISSSGGYTGYADSVKG

SEQ ID NO: 2799 - protein, 15 aa, Artificial Sequence
  Description of Artificial Sequence: Synthetic peptide
DRAYGDYVGWNGFDY

SEQ ID NO: 2800 - protein, 11 aa, Artificial Sequence
  Description of Artificial Sequence: Synthetic peptide
RASQSISSFLA

SEQ ID NO: 2801 - protein, 7 aa, Artificial Sequence
  Description of Artificial Sequence: Synthetic peptide
DASYRAT

SEQ ID NO: 2802 - protein, 9 aa, Artificial Sequence
  Description of Artificial Sequence: Synthetic peptide
QQRGNWPIT

SEQ ID NO: 2803 - protein, 5 aa, Artificial Sequence
  Description of Artificial Sequence: Synthetic peptide
HYPMM

SEQ ID NO: 2804 - protein, 17 aa, Artificial Sequence
  Description of Artificial Sequence: Synthetic peptide
YIYSSGGGTYYADSVKG

SEQ ID NO: 2805 - protein, 15 aa, Artificial Sequence
  Description of Artificial Sequence: Synthetic peptide
DRAYGDYVGWNGFDY

SEQ ID NO: 2806 - protein, 11 aa, Artificial Sequence
  Description of Artificial Sequence: Synthetic peptide
RASQSISSFLA

SEQ ID NO: 2807 - protein, 7 aa, Artificial Sequence
  Description of Artificial Sequence: Synthetic peptide
DASYRAT

SEQ ID NO: 2808 - protein, 9 aa, Artificial Sequence
  Description of Artificial Sequence: Synthetic peptide
QQRGNWPIT

SEQ ID NO: 2809 - protein, 5 aa, Artificial Sequence
  Description of Artificial Sequence: Synthetic peptide
HYPMV

SEQ ID NO: 2810 - protein, 17 aa, Artificial Sequence
  Description of Artificial Sequence: Synthetic peptide
YISPSGGYTGYADSVKG

SEQ ID NO: 2811 - protein, 15 aa, Artificial Sequence
  Description of Artificial Sequence: Synthetic peptide
DRAYGDYVGWNGFDY

SEQ ID NO: 2812 - protein, 11 aa, Artificial Sequence
  Description of Artificial Sequence: Synthetic peptide
RASQSISSFLA

SEQ ID NO: 2813 - protein, 7 aa, Artificial Sequence
  Description of Artificial Sequence: Synthetic peptide
DASYRAT

SEQ ID NO: 2814 - protein, 9 aa, Artificial Sequence
  Description of Artificial Sequence: Synthetic peptide
QQRGNWPIT

SEQ ID NO: 2815 - protein, 5 aa, Artificial Sequence
  Description of Artificial Sequence: Synthetic peptide
HYPMW

SEQ ID NO: 2816 - protein, 17 aa, Artificial Sequence
  Description of Artificial Sequence: Synthetic peptide
SISPSGGATFYADSVKG

SEQ ID NO: 2817 - protein, 15 aa, Artificial Sequence
  Description of Artificial Sequence: Synthetic peptide
DRAYGDYVGWNGFDY

SEQ ID NO: 2818 - protein, 11 aa, Artificial Sequence
  Description of Artificial Sequence: Synthetic peptide
RASQSISSFLA

SEQ ID NO: 2819 - protein, 7 aa, Artificial Sequence
  Description of Artificial Sequence: Synthetic peptide
DASYRAT

SEQ ID NO: 2820 - protein, 9 aa, Artificial Sequence
  Description of Artificial Sequence: Synthetic peptide
QQRGNWPIT

SEQ ID NO: 2821 - protein, 5 aa, Artificial Sequence
  Description of Artificial Sequence: Synthetic peptide
HYPMW

SEQ ID NO: 2822 - protein, 17 aa, Artificial Sequence
  Description of Artificial Sequence: Synthetic peptide
VIYSSGGGTFYADSVKG

SEQ ID NO: 2823 - protein, 15 aa, Artificial Sequence
  Description of Artificial Sequence: Synthetic peptide
DRAYGDYVGWNGFDY

SEQ ID NO: 2824 - protein, 11 aa, Artificial Sequence
  Description of Artificial Sequence: Synthetic peptide
RASQSISSFLA

SEQ ID NO: 2825 - protein, 7 aa, Artificial Sequence
  Description of Artificial Sequence: Synthetic peptide
DASYRAT

SEQ ID NO: 2826 - protein, 9 aa, Artificial Sequence
  Description of Artificial Sequence: Synthetic peptide
QQRGNWPIT

SEQ ID NO: 2827 - protein, 5 aa, Artificial Sequence
  Description of Artificial Sequence: Synthetic peptide
HYPMW

SEQ ID NO: 2828 - protein, 17 aa, Artificial Sequence
  Description of Artificial Sequence: Synthetic peptide
WIVPSGGFTLYADSVKG

SEQ ID NO: 2829 - protein, 15 aa, Artificial Sequence
  Description of Artificial Sequence: Synthetic peptide
DRAYGDYVGWNGFDY

SEQ ID NO: 2830 - protein, 11 aa, Artificial Sequence
  Description of Artificial Sequence: Synthetic peptide
RASQSISSFLA

SEQ ID NO: 2831 - protein, 7 aa, Artificial Sequence
  Description of Artificial Sequence: Synthetic peptide
DASYRAT

SEQ ID NO: 2832 - protein, 9 aa, Artificial Sequence
  Description of Artificial Sequence: Synthetic peptide
QQRGNWPIT

SEQ ID NO: 2833 - protein, 5 aa, Artificial Sequence
  Description of Artificial Sequence: Synthetic peptide
HYPMW

SEQ ID NO: 2834 - protein, 17 aa, Artificial Sequence
  Description of Artificial Sequence: Synthetic peptide
YIHPSGGGTLYADSVKG

SEQ ID NO: 2835 - protein, 15 aa, Artificial Sequence
  Description of Artificial Sequence: Synthetic peptide
DRAYGDYVGWNGFDY

SEQ ID NO: 2836 - protein, 11 aa, Artificial Sequence
  Description of Artificial Sequence: Synthetic peptide
RASQSISSFLA

SEQ ID NO: 2837 - protein, 7 aa, Artificial Sequence
  Description of Artificial Sequence: Synthetic peptide
DASYRAT

SEQ ID NO: 2838 - protein, 9 aa, Artificial Sequence
  Description of Artificial Sequence: Synthetic peptide
QQRGNWPIT

SEQ ID NO: 2839 - protein, 5 aa, Artificial Sequence
  Description of Artificial Sequence: Synthetic peptide
HYPMW

SEQ ID NO: 2840 - protein, 17 aa, Artificial Sequence
  Description of Artificial Sequence: Synthetic peptide
YISSSGGGTFYADSVKG

SEQ ID NO: 2841 - protein, 15 aa, Artificial Sequence
  Description of Artificial Sequence: Synthetic peptide
DRAYGDYVGWNGFDY

SEQ ID NO: 2842 - protein, 11 aa, Artificial Sequence
  Description of Artificial Sequence: Synthetic peptide
RASQSISSFLA

SEQ ID NO: 2843 - protein, 7 aa, Artificial Sequence
  Description of Artificial Sequence: Synthetic peptide
DASYRAT

SEQ ID NO: 2844 - protein, 9 aa, Artificial Sequence
  Description of Artificial Sequence: Synthetic peptide
QQRGNWPIT

SEQ ID NO: 2845 - protein, 5 aa, Artificial Sequence
  Description of Artificial Sequence: Synthetic peptide
HYPMW

SEQ ID NO: 2846 - protein, 17 aa, Artificial Sequence
  Description of Artificial Sequence: Synthetic peptide
YIVPSGGATFYADSVKG

SEQ ID NO: 2847 - protein, 15 aa, Artificial Sequence
  Description of Artificial Sequence: Synthetic peptide
DRAYGDYVGWNGFDY

SEQ ID NO: 2848 - protein, 11 aa, Artificial Sequence
  Description of Artificial Sequence: Synthetic peptide
RASQSISSFLA

SEQ ID NO: 2849 - protein, 7 aa, Artificial Sequence
  Description of Artificial Sequence: Synthetic peptide
DASYRAT

SEQ ID NO: 2850 - protein, 9 aa, Artificial Sequence
  Description of Artificial Sequence: Synthetic peptide
QQRGNWPIT

SEQ ID NO: 2851 - protein, 5 aa, Artificial Sequence
  Description of Artificial Sequence: Synthetic peptide
HYPMW

SEQ ID NO: 2852 - protein, 17 aa, Artificial Sequence
  Description of Artificial Sequence: Synthetic peptide
YIYPSGGGTYYADSVKG

SEQ ID NO: 2853 - protein, 15 aa, Artificial Sequence
  Description of Artificial Sequence: Synthetic peptide
DRAYGDYVGWNGFDY

SEQ ID NO: 2854 - protein, 11 aa, Artificial Sequence
  Description of Artificial Sequence: Synthetic peptide
RASQSISSFLA

SEQ ID NO: 2855 - protein, 7 aa, Artificial Sequence
  Description of Artificial Sequence: Synthetic peptide
DASYRAT

SEQ ID NO: 2856 - protein, 9 aa, Artificial Sequence
  Description of Artificial Sequence: Synthetic peptide
QQRGNWPIT

SEQ ID NO: 2857 - protein, 5 aa, Artificial Sequence
  Description of Artificial Sequence: Synthetic peptide
HYQMW

SEQ ID NO: 2858 - protein, 17 aa, Artificial Sequence
  Description of Artificial Sequence: Synthetic peptide
SISSSGGGTYYADSVKG

SEQ ID NO: 2859 - protein, 15 aa, Artificial Sequence
  Description of Artificial Sequence: Synthetic peptide
DRAYGDYVGWNGFDY

SEQ ID NO: 2860 - protein, 11 aa, Artificial Sequence
  Description of Artificial Sequence: Synthetic peptide
RASQSISSFLA

SEQ ID NO: 2861 - protein, 7 aa, Artificial Sequence
  Description of Artificial Sequence: Synthetic peptide
DASYRAT

SEQ ID NO: 2862 - protein, 9 aa, Artificial Sequence
  Description of Artificial Sequence: Synthetic peptide
QQRGNWPIT

SEQ ID NO: 2863 - protein, 5 aa, Artificial Sequence
  Description of Artificial Sequence: Synthetic peptide
HYSMM

SEQ ID NO: 2864 - protein, 17 aa, Artificial Sequence
  Description of Artificial Sequence: Synthetic peptide
YISPSGGYTGYADSVKG

SEQ ID NO: 2865 - protein, 15 aa, Artificial Sequence
  Description of Artificial Sequence: Synthetic peptide
DRAYGDYVGWNGFDY

SEQ ID NO: 2866 - protein, 11 aa, Artificial Sequence
  Description of Artificial Sequence: Synthetic peptide
RASQSISSFLA

SEQ ID NO: 2867 - protein, 7 aa, Artificial Sequence
  Description of Artificial Sequence: Synthetic peptide
DASYRAT

SEQ ID NO: 2868 - protein, 9 aa, Artificial Sequence
  Description of Artificial Sequence: Synthetic peptide
QQRGNWPIT

SEQ ID NO: 2869 - protein, 5 aa, Artificial Sequence
  Description of Artificial Sequence: Synthetic peptide
HYSMW

SEQ ID NO: 2870 - protein, 17 aa, Artificial Sequence
  Description of Artificial Sequence: Synthetic peptide
VIYPSGGATFYADSVKG

SEQ ID NO: 2871 - protein, 15 aa, Artificial Sequence
  Description of Artificial Sequence: Synthetic peptide
DRAYGDYVGWNGFDY

SEQ ID NO: 2872 - protein, 11 aa, Artificial Sequence
  Description of Artificial Sequence: Synthetic peptide
RASQSISSFLA

SEQ ID NO: 2873 - protein, 7 aa, Artificial Sequence
  Description of Artificial Sequence: Synthetic peptide
DASYRAT

SEQ ID NO: 2874 - protein, 9 aa, Artificial Sequence
  Description of Artificial Sequence: Synthetic peptide
QQRGNWPIT

SEQ ID NO: 2875 - protein, 5 aa, Artificial Sequence
  Description of Artificial Sequence: Synthetic peptide
IYDMW

SEQ ID NO: 2876 - protein, 17 aa, Artificial Sequence
  Description of Artificial Sequence: Synthetic peptide
VISPSGGSTYYADSVKG

SEQ ID NO: 2877 - protein, 15 aa, Artificial Sequence
  Description of Artificial Sequence: Synthetic peptide
DRAYGDYVGWNGFDY

SEQ ID NO: 2878 - protein, 11 aa, Artificial Sequence
  Description of Artificial Sequence: Synthetic peptide
RASQSISSFLA

SEQ ID NO: 2879 - protein, 7 aa, Artificial Sequence
  Description of Artificial Sequence: Synthetic peptide
DASYRAT

SEQ ID NO: 2880 - protein, 9 aa, Artificial Sequence
  Description of Artificial Sequence: Synthetic peptide
QQRGNWPIT

SEQ ID NO: 2881 - protein, 5 aa, Artificial Sequence
  Description of Artificial Sequence: Synthetic peptide
IYDMW

SEQ ID NO: 2882 - protein, 17 aa, Artificial Sequence
  Description of Artificial Sequence: Synthetic peptide
VIYPSGGATWYADSVKG

SEQ ID NO: 2883 - protein, 15 aa, Artificial Sequence
  Description of Artificial Sequence: Synthetic peptide
DRAYGDYVGWNGFDY

SEQ ID NO: 2884 - protein, 11 aa, Artificial Sequence
  Description of Artificial Sequence: Synthetic peptide
RASQSISSFLA

SEQ ID NO: 2885 - protein, 7 aa, Artificial Sequence
  Description of Artificial Sequence: Synthetic peptide
DASYRAT

SEQ ID NO: 2886 - protein, 9 aa, Artificial Sequence
  Description of Artificial Sequence: Synthetic peptide
QQRGNWPIT

SEQ ID NO: 2887 - protein, 5 aa, Artificial Sequence
  Description of Artificial Sequence: Synthetic peptide
IYDMW

SEQ ID NO: 2888 - protein, 17 aa, Artificial Sequence
  Description of Artificial Sequence: Synthetic peptide
VIYPSGGPTFYADSVKG

SEQ ID NO: 2889 - protein, 15 aa, Artificial Sequence
  Description of Artificial Sequence: Synthetic peptide
DRAYGDYVGWNGFDY

SEQ ID NO: 2890 - protein, 11 aa, Artificial Sequence
  Description of Artificial Sequence: Synthetic peptide
RASQSISSFLA

SEQ ID NO: 2891 - protein, 7 aa, Artificial Sequence
  Description of Artificial Sequence: Synthetic peptide
DASYRAT

SEQ ID NO: 2892 - protein, 9 aa, Artificial Sequence
  Description of Artificial Sequence: Synthetic peptide
QQRGNWPIT

SEQ ID NO: 2893 - protein, 5 aa, Artificial Sequence
  Description of Artificial Sequence: Synthetic peptide
IYDMW

SEQ ID NO: 2894 - protein, 17 aa, Artificial Sequence
  Description of Artificial Sequence: Synthetic peptide
VIYPSGGVTFYADSVKG

SEQ ID NO: 2895 - protein, 15 aa, Artificial Sequence
  Description of Artificial Sequence: Synthetic peptide
DRAYGDYVGWNGFDY

SEQ ID NO: 2896 - protein, 11 aa, Artificial Sequence
  Description of Artificial Sequence: Synthetic peptide
RASQSISSFLA

SEQ ID NO: 2897 - protein, 7 aa, Artificial Sequence
  Description of Artificial Sequence: Synthetic peptide
DASYRAT

SEQ ID NO: 2898 - protein, 9 aa, Artificial Sequence
  Description of Artificial Sequence: Synthetic peptide
QQRGNWPIT

SEQ ID NO: 2899 - protein, 5 aa, Artificial Sequence
  Description of Artificial Sequence: Synthetic peptide
IYDMW

SEQ ID NO: 2900 - protein, 17 aa, Artificial Sequence
  Description of Artificial Sequence: Synthetic peptide
VIYSSGGFTGYADSVKG

SEQ ID NO: 2901 - protein, 15 aa, Artificial Sequence
  Description of Artificial Sequence: Synthetic peptide
DRAYGDYVGWNGFDY

SEQ ID NO: 2902 - protein, 11 aa, Artificial Sequence
  Description of Artificial Sequence: Synthetic peptide
RASQSISSFLA

SEQ ID NO: 2903 - protein, 7 aa, Artificial Sequence
  Description of Artificial Sequence: Synthetic peptide
DASYRAT

SEQ ID NO: 2904 - protein, 9 aa, Artificial Sequence
  Description of Artificial Sequence: Synthetic peptide
QQRGNWPIT

SEQ ID NO: 2905 - protein, 5 aa, Artificial Sequence
  Description of Artificial Sequence: Synthetic peptide
IYPMI

SEQ ID NO: 2906 - protein, 17 aa, Artificial Sequence
  Description of Artificial Sequence: Synthetic peptide
YISPSGGYTSYADSVKG

SEQ ID NO: 2907 - protein, 15 aa, Artificial Sequence
  Description of Artificial Sequence: Synthetic peptide
DRAYGDYVGWNGFDY

SEQ ID NO: 2908 - protein, 11 aa, Artificial Sequence
  Description of Artificial Sequence: Synthetic peptide
RASQSISSFLA

SEQ ID NO: 2909 - protein, 7 aa, Artificial Sequence
  Description of Artificial Sequence: Synthetic peptide
DASYRAT

SEQ ID NO: 2910 - protein, 9 aa, Artificial Sequence
  Description of Artificial Sequence: Synthetic peptide
QQRGNWPIT

SEQ ID NO: 2911 - protein, 5 aa, Artificial Sequence
  Description of Artificial Sequence: Synthetic peptide
IYPMW

SEQ ID NO: 2912 - protein, 17 aa, Artificial Sequence
  Description of Artificial Sequence: Synthetic peptide
YISPSGGFTSYADSVKG

SEQ ID NO: 2913 - protein, 15 aa, Artificial Sequence
  Description of Artificial Sequence: Synthetic peptide
DRAYGDYVGWNGFDY

SEQ ID NO: 2914 - protein, 11 aa, Artificial Sequence
  Description of Artificial Sequence: Synthetic peptide
RASQSISSFLA

SEQ ID NO: 2915 - protein, 7 aa, Artificial Sequence
  Description of Artificial Sequence: Synthetic peptide
DASYRAT

SEQ ID NO: 2916 - protein, 9 aa, Artificial Sequence
  Description of Artificial Sequence: Synthetic peptide
QQRGNWPIT

SEQ ID NO: 2917 - protein, 5 aa, Artificial Sequence
  Description of Artificial Sequence: Synthetic peptide
IYPMW

SEQ ID NO: 2918 - protein, 17 aa, Artificial Sequence
  Description of Artificial Sequence: Synthetic peptide
YISPSGGGTYYADSVKG

SEQ ID NO: 2919 - protein, 15 aa, Artificial Sequence
  Description of Artificial Sequence: Synthetic peptide
DRAYGDYVGWNGFDY

SEQ ID NO: 2920 - protein, 11 aa, Artificial Sequence
  Description of Artificial Sequence: Synthetic peptide
RASQSISSFLA

SEQ ID NO: 2921 - protein, 7 aa, Artificial Sequence
  Description of Artificial Sequence: Synthetic peptide
DASYRAT

SEQ ID NO: 2922 - protein, 9 aa, Artificial Sequence
  Description of Artificial Sequence: Synthetic peptide
QQRGNWPIT

SEQ ID NO: 2923 - protein, 5 aa, Artificial Sequence
  Description of Artificial Sequence: Synthetic peptide
IYPMW

SEQ ID NO: 2924 - protein, 17 aa, Artificial Sequence
  Description of Artificial Sequence: Synthetic peptide
YISSSGGWTDYADSVKG

SEQ ID NO: 2925 - protein, 15 aa, Artificial Sequence
  Description of Artificial Sequence: Synthetic peptide
DRAYGDYVGWNGFDY

SEQ ID NO: 2926 - protein, 11 aa, Artificial Sequence
  Description of Artificial Sequence: Synthetic peptide
RASQSISSFLA

SEQ ID NO: 2927 - protein, 7 aa, Artificial Sequence
  Description of Artificial Sequence: Synthetic peptide
DASYRAT

SEQ ID NO: 2928 - protein, 9 aa, Artificial Sequence
  Description of Artificial Sequence: Synthetic peptide
QQRGNWPIT

SEQ ID NO: 2929 - protein, 5 aa, Artificial Sequence
  Description of Artificial Sequence: Synthetic peptide
IYPMW

SEQ ID NO: 2930 - protein, 17 aa, Artificial Sequence
  Description of Artificial Sequence: Synthetic peptide
YIVPSGGMTYYADSVKG

SEQ ID NO: 2931 - protein, 15 aa, Artificial Sequence
  Description of Artificial Sequence: Synthetic peptide
DRAYGDYVGWNGFDY

SEQ ID NO: 2932 - protein, 11 aa, Artificial Sequence
  Description of Artificial Sequence: Synthetic peptide
RASQSISSFLA

SEQ ID NO: 2933 - protein, 7 aa, Artificial Sequence
  Description of Artificial Sequence: Synthetic peptide
DASYRAT

SEQ ID NO: 2934 - protein, 9 aa, Artificial Sequence
  Description of Artificial Sequence: Synthetic peptide
QQRGNWPIT

SEQ ID NO: 2935 - protein, 5 aa, Artificial Sequence
  Description of Artificial Sequence: Synthetic peptide
IYPMW

SEQ ID NO: 2936 - protein, 17 aa, Artificial Sequence
  Description of Artificial Sequence: Synthetic peptide
YIYPSGGGTFYADSVKG

SEQ ID NO: 2937 - protein, 15 aa, Artificial Sequence
  Description of Artificial Sequence: Synthetic peptide
DRAYGDYVGWNGFDY

SEQ ID NO: 2938 - protein, 11 aa, Artificial Sequence
  Description of Artificial Sequence: Synthetic peptide
RASQSISSFLA

SEQ ID NO: 2939 - protein, 7 aa, Artificial Sequence
  Description of Artificial Sequence: Synthetic peptide
DASYRAT

SEQ ID NO: 2940 - protein, 9 aa, Artificial Sequence
  Description of Artificial Sequence: Synthetic peptide
QQRGNWPIT

SEQ ID NO: 2941 - protein, 5 aa, Artificial Sequence
  Description of Artificial Sequence: Synthetic peptide
KYAMI

SEQ ID NO: 2942 - protein, 17 aa, Artificial Sequence
  Description of Artificial Sequence: Synthetic peptide
WIPPSGGYTSYADSVKG

SEQ ID NO: 2943 - protein, 15 aa, Artificial Sequence
  Description of Artificial Sequence: Synthetic peptide
DRAYGDYVGWNGFDY

SEQ ID NO: 2944 - protein, 11 aa, Artificial Sequence
  Description of Artificial Sequence: Synthetic peptide
RASQSISSFLA

SEQ ID NO: 2945 - protein, 7 aa, Artificial Sequence
  Description of Artificial Sequence: Synthetic peptide
DASYRAT

SEQ ID NO: 2946 - protein, 9 aa, Artificial Sequence
  Description of Artificial Sequence: Synthetic peptide
QQRGNWPIT

SEQ ID NO: 2947 - protein, 5 aa, Artificial Sequence
  Description of Artificial Sequence: Synthetic peptide
KYAMI

SEQ ID NO: 2948 - protein, 17 aa, Artificial Sequence
  Description of Artificial Sequence: Synthetic peptide
YISPSGGFTGYADSVKG

SEQ ID NO: 2949 - protein, 15 aa, Artificial Sequence
  Description of Artificial Sequence: Synthetic peptide
DRAYGDYVGWNGFDY

SEQ ID NO: 2950 - protein, 11 aa, Artificial Sequence
  Description of Artificial Sequence: Synthetic peptide
RASQSISSFLA

SEQ ID NO: 2951 - protein, 7 aa, Artificial Sequence
  Description of Artificial Sequence: Synthetic peptide
DASYRAT

SEQ ID NO: 2952 - protein, 9 aa, Artificial Sequence
  Description of Artificial Sequence: Synthetic peptide
QQRGNWPIT

SEQ ID NO: 2953 - protein, 5 aa, Artificial Sequence
  Description of Artificial Sequence: Synthetic peptide
KYAMI

SEQ ID NO: 2954 - protein, 17 aa, Artificial Sequence
  Description of Artificial Sequence: Synthetic peptide
YISSSGGFTDYADSVKG

SEQ ID NO: 2955 - protein, 15 aa, Artificial Sequence
  Description of Artificial Sequence: Synthetic peptide
DRAYGDYVGWNGFDY

SEQ ID NO: 2956 - protein, 11 aa, Artificial Sequence
  Description of Artificial Sequence: Synthetic peptide
RASQSISSFLA

SEQ ID NO: 2957 - protein, 7 aa, Artificial Sequence
  Description of Artificial Sequence: Synthetic peptide
DASYRAT

SEQ ID NO: 2958 - protein, 9 aa, Artificial Sequence
  Description of Artificial Sequence: Synthetic peptide
QQRGNWPIT

SEQ ID NO: 2959 - protein, 5 aa, Artificial Sequence
  Description of Artificial Sequence: Synthetic peptide
KYAMW

SEQ ID NO: 2960 - protein, 17 aa, Artificial Sequence
  Description of Artificial Sequence: Synthetic peptide
SISPSGGGTFYADSVKG

SEQ ID NO: 2961 - protein, 15 aa, Artificial Sequence
  Description of Artificial Sequence: Synthetic peptide
DRAYGDYVGWNGFDY

SEQ ID NO: 2962 - protein, 11 aa, Artificial Sequence
  Description of Artificial Sequence: Synthetic peptide
RASQSISSFLA

SEQ ID NO: 2963 - protein, 7 aa, Artificial Sequence
  Description of Artificial Sequence: Synthetic peptide
DASYRAT

SEQ ID NO: 2964 - protein, 9 aa, Artificial Sequence
  Description of Artificial Sequence: Synthetic peptide
QQRGNWPIT

SEQ ID NO: 2965 - protein, 5 aa, Artificial Sequence
  Description of Artificial Sequence: Synthetic peptide
KYAMW

SEQ ID NO: 2966 - protein, 17 aa, Artificial Sequence
  Description of Artificial Sequence: Synthetic peptide
YIVPSGGRTFYADSVKG

SEQ ID NO: 2967 - protein, 15 aa, Artificial Sequence
  Description of Artificial Sequence: Synthetic peptide
DRAYGDYVGWNGFDY

SEQ ID NO: 2968 - protein, 11 aa, Artificial Sequence
  Description of Artificial Sequence: Synthetic peptide
RASQSISSFLA

SEQ ID NO: 2969 - protein, 7 aa, Artificial Sequence
  Description of Artificial Sequence: Synthetic peptide
DASYRAT

SEQ ID NO: 2970 - protein, 9 aa, Artificial Sequence
  Description of Artificial Sequence: Synthetic peptide
QQRGNWPIT

SEQ ID NO: 2971 - protein, 5 aa, Artificial Sequence
  Description of Artificial Sequence: Synthetic peptide
KYDMF

SEQ ID NO: 2972 - protein, 17 aa, Artificial Sequence
  Description of Artificial Sequence: Synthetic peptide
SIVPSGGATYYADSVKG

SEQ ID NO: 2973 - protein, 15 aa, Artificial Sequence
  Description of Artificial Sequence: Synthetic peptide
DRAYGDYVGWNGFDY

SEQ ID NO: 2974 - protein, 11 aa, Artificial Sequence
  Description of Artificial Sequence: Synthetic peptide
RASQSISSFLA

SEQ ID NO: 2975 - protein, 7 aa, Artificial Sequence
  Description of Artificial Sequence: Synthetic peptide
DASYRAT

SEQ ID NO: 2976 - protein, 9 aa, Artificial Sequence
  Description of Artificial Sequence: Synthetic peptide
QQRGNWPIT

SEQ ID NO: 2977 - protein, 5 aa, Artificial Sequence
  Description of Artificial Sequence: Synthetic peptide
KYDMI

SEQ ID NO: 2978 - protein, 17 aa, Artificial Sequence
  Description of Artificial Sequence: Synthetic peptide
WIGPSGGATMYADSVKG

SEQ ID NO: 2979 - protein, 15 aa, Artificial Sequence
  Description of Artificial Sequence: Synthetic peptide
DRAYGDYVGWNGFDY

SEQ ID NO: 2980 - protein, 11 aa, Artificial Sequence
  Description of Artificial Sequence: Synthetic peptide
RASQSISSFLA

SEQ ID NO: 2981 - protein, 7 aa, Artificial Sequence
  Description of Artificial Sequence: Synthetic peptide
DASYRAT

SEQ ID NO: 2982 - protein, 9 aa, Artificial Sequence
  Description of Artificial Sequence: Synthetic peptide
QQRGNWPIT

SEQ ID NO: 2983 - protein, 5 aa, Artificial Sequence
  Description of Artificial Sequence: Synthetic peptide
KYDMI

SEQ ID NO: 2984 - protein, 17 aa, Artificial Sequence
  Description of Artificial Sequence: Synthetic peptide
YIGSSGGYTGYADSVKG

SEQ ID NO: 2985 - protein, 15 aa, Artificial Sequence
  Description of Artificial Sequence: Synthetic peptide
DRAYGDYVGWNGFDY

SEQ ID NO: 2986 - protein, 11 aa, Artificial Sequence
  Description of Artificial Sequence: Synthetic peptide
RASQSISSFLA

SEQ ID NO: 2987 - protein, 7 aa, Artificial Sequence
  Description of Artificial Sequence: Synthetic peptide
DASYRAT

SEQ ID NO: 2988 - protein, 9 aa, Artificial Sequence
  Description of Artificial Sequence: Synthetic peptide
QQRGNWPIT

SEQ ID NO: 2989 - protein, 5 aa, Artificial Sequence
  Description of Artificial Sequence: Synthetic peptide
KYDMW

SEQ ID NO: 2990 - protein, 17 aa, Artificial Sequence
  Description of Artificial Sequence: Synthetic peptide
SISSSGGGTFYADSVKG

SEQ ID NO: 2991 - protein, 15 aa, Artificial Sequence
  Description of Artificial Sequence: Synthetic peptide
DRAYGDYVGWNGFDY

SEQ ID NO: 2992 - protein, 11 aa, Artificial Sequence
  Description of Artificial Sequence: Synthetic peptide
RASQSISSFLA

SEQ ID NO: 2993 - protein, 7 aa, Artificial Sequence
  Description of Artificial Sequence: Synthetic peptide
DASYRAT

SEQ ID NO: 2994 - protein, 9 aa, Artificial Sequence
  Description of Artificial Sequence: Synthetic peptide
QQRGNWPIT

SEQ ID NO: 2995 - protein, 5 aa, Artificial Sequence
  Description of Artificial Sequence: Synthetic peptide
KYDMW

SEQ ID NO: 2996 - protein, 17 aa, Artificial Sequence
  Description of Artificial Sequence: Synthetic peptide
VIYPSGGPTFYADSVKG

SEQ ID NO: 2997 - protein, 15 aa, Artificial Sequence
  Description of Artificial Sequence: Synthetic peptide
DRAYGDYVGWNGFDY

SEQ ID NO: 2998 - protein, 11 aa, Artificial Sequence
  Description of Artificial Sequence: Synthetic peptide
RASQSISSFLA

SEQ ID NO: 2999 - protein, 7 aa, Artificial Sequence
  Description of Artificial Sequence: Synthetic peptide
DASYRAT

SEQ ID NO: 3000 - protein, 9 aa, Artificial Sequence
  Description of Artificial Sequence: Synthetic peptide
QQRGNWPIT

SEQ ID NO: 3001 - protein, 5 aa, Artificial Sequence
  Description of Artificial Sequence: Synthetic peptide
KYDMW

SEQ ID NO: 3002 - protein, 17 aa, Artificial Sequence
  Description of Artificial Sequence: Synthetic peptide
VIYPSGGQTYYADSVKG

SEQ ID NO: 3003 - protein, 15 aa, Artificial Sequence
  Description of Artificial Sequence: Synthetic peptide
DRAYGDYVGWNGFDY

SEQ ID NO: 3004 - protein, 11 aa, Artificial Sequence
  Description of Artificial Sequence: Synthetic peptide
RASQSISSFLA

SEQ ID NO: 3005 - protein, 7 aa, Artificial Sequence
  Description of Artificial Sequence: Synthetic peptide
DASYRAT

SEQ ID NO: 3006 - protein, 9 aa, Artificial Sequence
  Description of Artificial Sequence: Synthetic peptide
QQRGNWPIT

SEQ ID NO: 3007 - protein, 5 aa, Artificial Sequence
  Description of Artificial Sequence: Synthetic peptide
KYDMW

SEQ ID NO: 3008 - protein, 17 aa, Artificial Sequence
  Description of Artificial Sequence: Synthetic peptide
VIYPSGGSTYYADSVKG

SEQ ID NO: 3009 - protein, 15 aa, Artificial Sequence
  Description of Artificial Sequence: Synthetic peptide
DRAYGDYVGWNGFDY

SEQ ID NO: 3010 - protein, 11 aa, Artificial Sequence
  Description of Artificial Sequence: Synthetic peptide
RASQSISSFLA

SEQ ID NO: 3011 - protein, 7 aa, Artificial Sequence
  Description of Artificial Sequence: Synthetic peptide
DASYRAT

SEQ ID NO: 3012 - protein, 9 aa, Artificial Sequence
  Description of Artificial Sequence: Synthetic peptide
QQRGNWPIT

SEQ ID NO: 3013 - protein, 5 aa, Artificial Sequence
  Description of Artificial Sequence: Synthetic peptide
KYDMW

SEQ ID NO: 3014 - protein, 17 aa, Artificial Sequence
  Description of Artificial Sequence: Synthetic peptide
VIYSSGGFTLYADSVKG

SEQ ID NO: 3015 - protein, 15 aa, Artificial Sequence
  Description of Artificial Sequence: Synthetic peptide
DRAYGDYVGWNGFDY

SEQ ID NO: 3016 - protein, 11 aa, Artificial Sequence
  Description of Artificial Sequence: Synthetic peptide
RASQSISSFLA

SEQ ID NO: 3017 - protein, 7 aa, Artificial Sequence
  Description of Artificial Sequence: Synthetic peptide
DASYRAT

SEQ ID NO: 3018 - protein, 9 aa, Artificial Sequence
  Description of Artificial Sequence: Synthetic peptide
QQRGNWPIT

SEQ ID NO: 3019 - protein, 5 aa, Artificial Sequence
  Description of Artificial Sequence: Synthetic peptide
KYDMW

SEQ ID NO: 3020 - protein, 17 aa, Artificial Sequence
  Description of Artificial Sequence: Synthetic peptide
VIYSSGGFTSYADSVKG

SEQ ID NO: 3021 - protein, 15 aa, Artificial Sequence
  Description of Artificial Sequence: Synthetic peptide
DRAYGDYVGWNGFDY

SEQ ID NO: 3022 - protein, 11 aa, Artificial Sequence
  Description of Artificial Sequence: Synthetic peptide
RASQSISSFLA

SEQ ID NO: 3023 - protein, 7 aa, Artificial Sequence
  Description of Artificial Sequence: Synthetic peptide
DASYRAT

SEQ ID NO: 3024 - protein, 9 aa, Artificial Sequence
  Description of Artificial Sequence: Synthetic peptide
QQRGNWPIT

SEQ ID NO: 3025 - protein, 5 aa, Artificial Sequence
  Description of Artificial Sequence: Synthetic peptide
KYDMW

SEQ ID NO: 3026 - protein, 17 aa, Artificial Sequence
  Description of Artificial Sequence: Synthetic peptide
VIYSSGGPTFYADSVKG

SEQ ID NO: 3027 - protein, 15 aa, Artificial Sequence
  Description of Artificial Sequence: Synthetic peptide
DRAYGDYVGWNGFDY

SEQ ID NO: 3028 - protein, 11 aa, Artificial Sequence
  Description of Artificial Sequence: Synthetic peptide
RASQSISSFLA

SEQ ID NO: 3029 - protein, 7 aa, Artificial Sequence
  Description of Artificial Sequence: Synthetic peptide
DASYRAT

SEQ ID NO: 3030 - protein, 9 aa, Artificial Sequence
  Description of Artificial Sequence: Synthetic peptide
QQRGNWPIT

SEQ ID NO: 3031 - protein, 5 aa, Artificial Sequence
  Description of Artificial Sequence: Synthetic peptide
KYDMW

SEQ ID NO: 3032 - protein, 17 aa, Artificial Sequence
  Description of Artificial Sequence: Synthetic peptide
YIGPSGGFTDYADSVKG

SEQ ID NO: 3033 - protein, 15 aa, Artificial Sequence
  Description of Artificial Sequence: Synthetic peptide
DRAYGDYVGWNGFDY

SEQ ID NO: 3034 - protein, 11 aa, Artificial Sequence
  Description of Artificial Sequence: Synthetic peptide
RASQSISSFLA

SEQ ID NO: 3035 - protein, 7 aa, Artificial Sequence
  Description of Artificial Sequence: Synthetic peptide
DASYRAT

SEQ ID NO: 3036 - protein, 9 aa, Artificial Sequence
  Description of Artificial Sequence: Synthetic peptide
QQRGNWPIT

SEQ ID NO: 3037 - protein, 5 aa, Artificial Sequence
  Description of Artificial Sequence: Synthetic peptide
KYDMW

SEQ ID NO: 3038 - protein, 17 aa, Artificial Sequence
  Description of Artificial Sequence: Synthetic peptide
YISSSGGFTDYADSVKG

SEQ ID NO: 3039 - protein, 15 aa, Artificial Sequence
  Description of Artificial Sequence: Synthetic peptide
DRAYGDYVGWNGFDY

SEQ ID NO: 3040 - protein, 11 aa, Artificial Sequence
  Description of Artificial Sequence: Synthetic peptide
RASQSISSFLA

SEQ ID NO: 3041 - protein, 7 aa, Artificial Sequence
  Description of Artificial Sequence: Synthetic peptide
DASYRAT

SEQ ID NO: 3042 - protein, 9 aa, Artificial Sequence
  Description of Artificial Sequence: Synthetic peptide
QQRGNWPIT

SEQ ID NO: 3043 - protein, 5 aa, Artificial Sequence
  Description of Artificial Sequence: Synthetic peptide
KYDMW

SEQ ID NO: 3044 - protein, 17 aa, Artificial Sequence
  Description of Artificial Sequence: Synthetic peptide
YIVPSGGFIDYADSVKG

SEQ ID NO: 3045 - protein, 15 aa, Artificial Sequence
  Description of Artificial Sequence: Synthetic peptide
DRAYGDYVGWNGFDY

SEQ ID NO: 3046 - protein, 11 aa, Artificial Sequence
  Description of Artificial Sequence: Synthetic peptide
RASQSISSFLA

SEQ ID NO: 3047 - protein, 7 aa, Artificial Sequence
  Description of Artificial Sequence: Synthetic peptide
DASYRAT

SEQ ID NO: 3048 - protein, 9 aa, Artificial Sequence
  Description of Artificial Sequence: Synthetic peptide
QQRGNWPIT

SEQ ID NO: 3049 - protein, 5 aa, Artificial Sequence
  Description of Artificial Sequence: Synthetic peptide
KYEMF

SEQ ID NO: 3050 - protein, 17 aa, Artificial Sequence
  Description of Artificial Sequence: Synthetic peptide
SISSSGGGTFYADSVKG

SEQ ID NO: 3051 - protein, 15 aa, Artificial Sequence
  Description of Artificial Sequence: Synthetic peptide
DRAYGDYVGWNGFDY

SEQ ID NO: 3052 - protein, 11 aa, Artificial Sequence
  Description of Artificial Sequence: Synthetic peptide
RASQSISSFLA

SEQ ID NO: 3053 - protein, 7 aa, Artificial Sequence
  Description of Artificial Sequence: Synthetic peptide
DASYRAT

SEQ ID NO: 3054 - protein, 9 aa, Artificial Sequence
  Description of Artificial Sequence: Synthetic peptide
QQRGNWPIT

SEQ ID NO: 3055 - protein, 5 aa, Artificial Sequence
  Description of Artificial Sequence: Synthetic peptide
KYEMW

SEQ ID NO: 3056 - protein, 17 aa, Artificial Sequence
  Description of Artificial Sequence: Synthetic peptide
VIYPSGGMTYYADSVKG

SEQ ID NO: 3057 - protein, 15 aa, Artificial Sequence
  Description of Artificial Sequence: Synthetic peptide
DRAYGDYVGWNGFDY

SEQ ID NO: 3058 - protein, 11 aa, Artificial Sequence
  Description of Artificial Sequence: Synthetic peptide
RASQSISSFLA

SEQ ID NO: 3059 - protein, 7 aa, Artificial Sequence
  Description of Artificial Sequence: Synthetic peptide
DASYRAT

SEQ ID NO: 3060 - protein, 9 aa, Artificial Sequence
  Description of Artificial Sequence: Synthetic peptide
QQRGNWPIT

SEQ ID NO: 3061 - protein, 5 aa, Artificial Sequence
  Description of Artificial Sequence: Synthetic peptide
KYEMW

SEQ ID NO: 3062 - protein, 17 aa, Artificial Sequence
  Description of Artificial Sequence: Synthetic peptide
VIYPSGGYTGYADSVKG

SEQ ID NO: 3063 - protein, 15 aa, Artificial Sequence
  Description of Artificial Sequence: Synthetic peptide
DRAYGDYVGWNGFDY

SEQ ID NO: 3064 - protein, 11 aa, Artificial Sequence
  Description of Artificial Sequence: Synthetic peptide
RASQSISSFLA

SEQ ID NO: 3065 - protein, 7 aa, Artificial Sequence
  Description of Artificial Sequence: Synthetic peptide
DASYRAT

SEQ ID NO: 3066 - protein, 9 aa, Artificial Sequence
  Description of Artificial Sequence: Synthetic peptide
QQRGNWPIT

SEQ ID NO: 3067 - protein, 5 aa, Artificial Sequence
  Description of Artificial Sequence: Synthetic peptide
KYEMW

SEQ ID NO: 3068 - protein, 17 aa, Artificial Sequence
  Description of Artificial Sequence: Synthetic peptide
VIYSSGGKTYYADSVKG

SEQ ID NO: 3069 - protein, 15 aa, Artificial Sequence
  Description of Artificial Sequence: Synthetic peptide
DRAYGDYVGWNGFDY

SEQ ID NO: 3070 - protein, 11 aa, Artificial Sequence
  Description of Artificial Sequence: Synthetic peptide
RASQSISSFLA

SEQ ID NO: 3071 - protein, 7 aa, Artificial Sequence
  Description of Artificial Sequence: Synthetic peptide
DASYRAT

SEQ ID NO: 3072 - protein, 9 aa, Artificial Sequence
  Description of Artificial Sequence: Synthetic peptide
QQRGNWPIT

SEQ ID NO: 3073 - protein, 5 aa, Artificial Sequence
  Description of Artificial Sequence: Synthetic peptide
KYEMW

SEQ ID NO: 3074 - protein, 17 aa, Artificial Sequence
  Description of Artificial Sequence: Synthetic peptide
YIGPSGGFTDYADSVKG

SEQ ID NO: 3075 - protein, 15 aa, Artificial Sequence
  Description of Artificial Sequence: Synthetic peptide
DRAYGDYVGWNGFDY

SEQ ID NO: 3076 - protein, 11 aa, Artificial Sequence
  Description of Artificial Sequence: Synthetic peptide
RASQSISSFLA

SEQ ID NO: 3077 - protein, 7 aa, Artificial Sequence
  Description of Artificial Sequence: Synthetic peptide
DASYRAT

SEQ ID NO: 3078 - protein, 9 aa, Artificial Sequence
  Description of Artificial Sequence: Synthetic peptide
QQRGNWPIT

SEQ ID NO: 3079 - protein, 5 aa, Artificial Sequence
  Description of Artificial Sequence: Synthetic peptide
KYEMW

SEQ ID NO: 3080 - protein, 17 aa, Artificial Sequence
  Description of Artificial Sequence: Synthetic peptide
YIGPSGGITMYADSVKG

SEQ ID NO: 3081 - protein, 15 aa, Artificial Sequence
  Description of Artificial Sequence: Synthetic peptide
DRAYGDYVGWNGFDY

SEQ ID NO: 3082 - protein, 11 aa, Artificial Sequence
  Description of Artificial Sequence: Synthetic peptide
RASQSISSFLA

SEQ ID NO: 3083 - protein, 7 aa, Artificial Sequence
  Description of Artificial Sequence: Synthetic peptide
DASYRAT

SEQ ID NO: 3084 - protein, 9 aa, Artificial Sequence
  Description of Artificial Sequence: Synthetic peptide
QQRGNWPIT

SEQ ID NO: 3085 - protein, 5 aa, Artificial Sequence
  Description of Artificial Sequence: Synthetic peptide
KYEMW

SEQ ID NO: 3086 - protein, 17 aa, Artificial Sequence
  Description of Artificial Sequence: Synthetic peptide
YISPSGGGTLYADSVKG

SEQ ID NO: 3087 - protein, 15 aa, Artificial Sequence
  Description of Artificial Sequence: Synthetic peptide
DRAYGDYVGWNGFDY

SEQ ID NO: 3088 - protein, 11 aa, Artificial Sequence
  Description of Artificial Sequence: Synthetic peptide
RASQSISSFLA

SEQ ID NO: 3089 - protein, 7 aa, Artificial Sequence
  Description of Artificial Sequence: Synthetic peptide
DASYRAT

SEQ ID NO: 3090 - protein, 9 aa, Artificial Sequence
  Description of Artificial Sequence: Synthetic peptide
QQRGNWPIT

SEQ ID NO: 3091 - protein, 5 aa, Artificial Sequence
  Description of Artificial Sequence: Synthetic peptide
KYMMF

SEQ ID NO: 3092 - protein, 17 aa, Artificial Sequence
  Description of Artificial Sequence: Synthetic peptide
SIYSSGGRTFYADSVKG

SEQ ID NO: 3093 - protein, 15 aa, Artificial Sequence
  Description of Artificial Sequence: Synthetic peptide
DRAYGDYVGWNGFDY

SEQ ID NO: 3094 - protein, 11 aa, Artificial Sequence
  Description of Artificial Sequence: Synthetic peptide
RASQSISSFLA

SEQ ID NO: 3095 - protein, 7 aa, Artificial Sequence
  Description of Artificial Sequence: Synthetic peptide
DASYRAT

SEQ ID NO: 3096 - protein, 9 aa, Artificial Sequence
  Description of Artificial Sequence: Synthetic peptide
QQRGNWPIT

SEQ ID NO: 3097 - protein, 5 aa, Artificial Sequence
  Description of Artificial Sequence: Synthetic peptide
KYNMW

SEQ ID NO: 3098 - protein, 17 aa, Artificial Sequence
  Description of Artificial Sequence: Synthetic peptide
SIYPSGGATFYADSVKG

SEQ ID NO: 3099 - protein, 15 aa, Artificial Sequence
  Description of Artificial Sequence: Synthetic peptide
DRAYGDYVGWNGFDY

SEQ ID NO: 3100 - protein, 11 aa, Artificial Sequence
  Description of Artificial Sequence: Synthetic peptide
RASQSISSFLA

SEQ ID NO: 3101 - protein, 7 aa, Artificial Sequence
  Description of Artificial Sequence: Synthetic peptide
DASYRAT

SEQ ID NO: 3102 - protein, 9 aa, Artificial Sequence
  Description of Artificial Sequence: Synthetic peptide
QQRGNWPIT

SEQ ID NO: 3103 - protein, 5 aa, Artificial Sequence
  Description of Artificial Sequence: Synthetic peptide
KYNMW

SEQ ID NO: 3104 - protein, 17 aa, Artificial Sequence
  Description of Artificial Sequence: Synthetic peptide
VIYPSGGATFYADSVKG

SEQ ID NO: 3105 - protein, 15 aa, Artificial Sequence
  Description of Artificial Sequence: Synthetic peptide
DRAYGDYVGWNGFDY

SEQ ID NO: 3106 - protein, 11 aa, Artificial Sequence
  Description of Artificial Sequence: Synthetic peptide
RASQSISSFLA

SEQ ID NO: 3107 - protein, 7 aa, Artificial Sequence
  Description of Artificial Sequence: Synthetic peptide
DASYRAT

SEQ ID NO: 3108 - protein, 9 aa, Artificial Sequence
  Description of Artificial Sequence: Synthetic peptide
QQRGNWPIT

SEQ ID NO: 3109 - protein, 5 aa, Artificial Sequence
  Description of Artificial Sequence: Synthetic peptide
KYPMF

SEQ ID NO: 3110 - protein, 17 aa, Artificial Sequence
  Description of Artificial Sequence: Synthetic peptide
YIVPSGGYTSYADSVKG

SEQ ID NO: 3111 - protein, 15 aa, Artificial Sequence
  Description of Artificial Sequence: Synthetic peptide
DRAYGDYVGWNGFDY

SEQ ID NO: 3112 - protein, 11 aa, Artificial Sequence
  Description of Artificial Sequence: Synthetic peptide
RASQSISSFLA

SEQ ID NO: 3113 - protein, 7 aa, Artificial Sequence
  Description of Artificial Sequence: Synthetic peptide
DASYRAT

SEQ ID NO: 3114 - protein, 9 aa, Artificial Sequence
  Description of Artificial Sequence: Synthetic peptide
QQRGNWPIT

SEQ ID NO: 3115 - protein, 5 aa, Artificial Sequence
  Description of Artificial Sequence: Synthetic peptide
KYPMI

SEQ ID NO: 3116 - protein, 17 aa, Artificial Sequence
  Description of Artificial Sequence: Synthetic peptide
YISPSGGYTGYADSVKG

SEQ ID NO: 3117 - protein, 15 aa, Artificial Sequence
  Description of Artificial Sequence: Synthetic peptide
DRAYGDYVGWNGFDY

SEQ ID NO: 3118 - protein, 11 aa, Artificial Sequence
  Description of Artificial Sequence: Synthetic peptide
RASQSISSFLA

SEQ ID NO: 3119 - protein, 7 aa, Artificial Sequence
  Description of Artificial Sequence: Synthetic peptide
DASYRAT

SEQ ID NO: 3120 - protein, 9 aa, Artificial Sequence
  Description of Artificial Sequence: Synthetic peptide
QQRGNWPIT

SEQ ID NO: 3121 - protein, 5 aa, Artificial Sequence
  Description of Artificial Sequence: Synthetic peptide
KYPMI

SEQ ID NO: 3122 - protein, 17 aa, Artificial Sequence
  Description of Artificial Sequence: Synthetic peptide
YISPSGGYTSYADSVKG

SEQ ID NO: 3123 - protein, 15 aa, Artificial Sequence
  Description of Artificial Sequence: Synthetic peptide
DRAYGDYVGWNGFDY

SEQ ID NO: 3124 - protein, 11 aa, Artificial Sequence
  Description of Artificial Sequence: Synthetic peptide
RASQSISSFLA

SEQ ID NO: 3125 - protein, 7 aa, Artificial Sequence
  Description of Artificial Sequence: Synthetic peptide
DASYRAT

SEQ ID NO: 3126 - protein, 9 aa, Artificial Sequence
  Description of Artificial Sequence: Synthetic peptide
QQRGNWPIT

SEQ ID NO: 3127 - protein, 5 aa, Artificial Sequence
  Description of Artificial Sequence: Synthetic peptide
KYPMI

SEQ ID NO: 3128 - protein, 17 aa, Artificial Sequence
  Description of Artificial Sequence: Synthetic peptide
YISSSGGWTDYADSVKG

SEQ ID NO: 3129 - protein, 15 aa, Artificial Sequence
  Description of Artificial Sequence: Synthetic peptide
DRAYGDYVGWNGFDY

SEQ ID NO: 3130 - protein, 11 aa, Artificial Sequence
  Description of Artificial Sequence: Synthetic peptide
RASQSISSFLA

SEQ ID NO: 3131 - protein, 7 aa, Artificial Sequence
  Description of Artificial Sequence: Synthetic peptide
DASYRAT

SEQ ID NO: 3132 - protein, 9 aa, Artificial Sequence
  Description of Artificial Sequence: Synthetic peptide
QQRGNWPIT

SEQ ID NO: 3133 - protein, 5 aa, Artificial Sequence
  Description of Artificial Sequence: Synthetic peptide
KYPMI

SEQ ID NO: 3134 - protein, 17 aa, Artificial Sequence
  Description of Artificial Sequence: Synthetic peptide
YIYPSGGATYYADSVKG

SEQ ID NO: 3135 - protein, 15 aa, Artificial Sequence
  Description of Artificial Sequence: Synthetic peptide
DRAYGDYVGWNGFDY

SEQ ID NO: 3136 - protein, 11 aa, Artificial Sequence
  Description of Artificial Sequence: Synthetic peptide
RASQSISSFLA

SEQ ID NO: 3137 - protein, 7 aa, Artificial Sequence
  Description of Artificial Sequence: Synthetic peptide
DASYRAT

SEQ ID NO: 3138 - protein, 9 aa, Artificial Sequence
  Description of Artificial Sequence: Synthetic peptide
QQRGNWPIT

SEQ ID NO: 3139 - protein, 5 aa, Artificial Sequence
  Description of Artificial Sequence: Synthetic peptide
KYPMI

SEQ ID NO: 3140 - protein, 17 aa, Artificial Sequence
  Description of Artificial Sequence: Synthetic peptide
YIYPSGGYTSYADSVKG

SEQ ID NO: 3141 - protein, 15 aa, Artificial Sequence
  Description of Artificial Sequence: Synthetic peptide
DRAYGDYVGWNGFDY

SEQ ID NO: 3142 - protein, 11 aa, Artificial Sequence
  Description of Artificial Sequence: Synthetic peptide
RASQSISSFLA

SEQ ID NO: 3143 - protein, 7 aa, Artificial Sequence
  Description of Artificial Sequence: Synthetic peptide
DASYRAT

SEQ ID NO: 3144 - protein, 9 aa, Artificial Sequence
  Description of Artificial Sequence: Synthetic peptide
QQRGNWPIT

SEQ ID NO: 3145 - protein, 5 aa, Artificial Sequence
  Description of Artificial Sequence: Synthetic peptide
KYPMI

SEQ ID NO: 3146 - protein, 17 aa, Artificial Sequence
  Description of Artificial Sequence: Synthetic peptide
YIYSSGGGTYYADSVKG

SEQ ID NO: 3147 - protein, 15 aa, Artificial Sequence
  Description of Artificial Sequence: Synthetic peptide
DRAYGDYVGWNGFDY

SEQ ID NO: 3148 - protein, 11 aa, Artificial Sequence
  Description of Artificial Sequence: Synthetic peptide
RASQSISSFLA

SEQ ID NO: 3149 - protein, 7 aa, Artificial Sequence
  Description of Artificial Sequence: Synthetic peptide
DASYRAT

SEQ ID NO: 3150 - protein, 9 aa, Artificial Sequence
  Description of Artificial Sequence: Synthetic peptide
QQRGNWPIT

SEQ ID NO: 3151 - protein, 5 aa, Artificial Sequence
  Description of Artificial Sequence: Synthetic peptide
KYPMM

SEQ ID NO: 3152 - protein, 17 aa, Artificial Sequence
  Description of Artificial Sequence: Synthetic peptide
YISPSGGFTDYADSVKG

SEQ ID NO: 3153 - protein, 15 aa, Artificial Sequence
  Description of Artificial Sequence: Synthetic peptide
DRAYGDYVGWNGFDY

SEQ ID NO: 3154 - protein, 11 aa, Artificial Sequence
  Description of Artificial Sequence: Synthetic peptide
RASQSISSFLA

SEQ ID NO: 3155 - protein, 7 aa, Artificial Sequence
  Description of Artificial Sequence: Synthetic peptide
DASYRAT

SEQ ID NO: 3156 - protein, 9 aa, Artificial Sequence
  Description of Artificial Sequence: Synthetic peptide
QQRGNWPIT

SEQ ID NO: 3157 - protein, 5 aa, Artificial Sequence
  Description of Artificial Sequence: Synthetic peptide
KYPMM

SEQ ID NO: 3158 - protein, 17 aa, Artificial Sequence
  Description of Artificial Sequence: Synthetic peptide
YIYPSGGYTDYADSVKG

SEQ ID NO: 3159 - protein, 15 aa, Artificial Sequence
  Description of Artificial Sequence: Synthetic peptide
DRAYGDYVGWNGFDY

SEQ ID NO: 3160 - protein, 11 aa, Artificial Sequence
  Description of Artificial Sequence: Synthetic peptide
RASQSISSFLA

SEQ ID NO: 3161 - protein, 7 aa, Artificial Sequence
  Description of Artificial Sequence: Synthetic peptide
DASYRAT

SEQ ID NO: 3162 - protein, 9 aa, Artificial Sequence
  Description of Artificial Sequence: Synthetic peptide
QQRGNWPIT

SEQ ID NO: 3163 - protein, 5 aa, Artificial Sequence
  Description of Artificial Sequence: Synthetic peptide
KYPMM

SEQ ID NO: 3164 - protein, 17 aa, Artificial Sequence
  Description of Artificial Sequence: Synthetic peptide
YIYPSGGYTGYADSVKG

SEQ ID NO: 3165 - protein, 15 aa, Artificial Sequence
  Description of Artificial Sequence: Synthetic peptide
DRAYGDYVGWNGFDY

SEQ ID NO: 3166 - protein, 11 aa, Artificial Sequence
  Description of Artificial Sequence: Synthetic peptide
RASQSISSFLA

SEQ ID NO: 3167 - protein, 7 aa, Artificial Sequence
  Description of Artificial Sequence: Synthetic peptide
DASYRAT

SEQ ID NO: 3168 - protein, 9 aa, Artificial Sequence
  Description of Artificial Sequence: Synthetic peptide
QQRGNWPIT

SEQ ID NO: 3169 - protein, 5 aa, Artificial Sequence
  Description of Artificial Sequence: Synthetic peptide
KYPMW

SEQ ID NO: 3170 - protein, 17 aa, Artificial Sequence
  Description of Artificial Sequence: Synthetic peptide
SIVSSGGATYYTDSVKG

SEQ ID NO: 3171 - protein, 15 aa, Artificial Sequence
  Description of Artificial Sequence: Synthetic peptide
DRAYGDYVGWNGFDY

SEQ ID NO: 3172 - protein, 11 aa, Artificial Sequence
  Description of Artificial Sequence: Synthetic peptide
RASQSISSFLA

SEQ ID NO: 3173 - protein, 7 aa, Artificial Sequence
  Description of Artificial Sequence: Synthetic peptide
DASYRAT

SEQ ID NO: 3174 - protein, 9 aa, Artificial Sequence
  Description of Artificial Sequence: Synthetic peptide
QQRGNWPIT

SEQ ID NO: 3175 - protein, 5 aa, Artificial Sequence
  Description of Artificial Sequence: Synthetic peptide
KYPMW

SEQ ID NO: 3176 - protein, 17 aa, Artificial Sequence
  Description of Artificial Sequence: Synthetic peptide
SIYPSGGYTGYADSVKG

SEQ ID NO: 3177 - protein, 15 aa, Artificial Sequence
  Description of Artificial Sequence: Synthetic peptide
DRAYGDYVGWNGFDY

SEQ ID NO: 3178 - protein, 11 aa, Artificial Sequence
  Description of Artificial Sequence: Synthetic peptide
RASQSISSFLA

SEQ ID NO: 3179 - protein, 7 aa, Artificial Sequence
  Description of Artificial Sequence: Synthetic peptide
DASYRAT

SEQ ID NO: 3180 - protein, 9 aa, Artificial Sequence
  Description of Artificial Sequence: Synthetic peptide
QQRGNWPIT

SEQ ID NO: 3181 - protein, 5 aa, Artificial Sequence
  Description of Artificial Sequence: Synthetic peptide
KYPMW

SEQ ID NO: 3182 - protein, 17 aa, Artificial Sequence
  Description of Artificial Sequence: Synthetic peptide
VISPSGGATYYADSVKG

SEQ ID NO: 3183 - protein, 15 aa, Artificial Sequence
  Description of Artificial Sequence: Synthetic peptide
DRAYGDYVGWNGFDY

SEQ ID NO: 3184 - protein, 11 aa, Artificial Sequence
  Description of Artificial Sequence: Synthetic peptide
RASQSISSFLA

SEQ ID NO: 3185 - protein, 7 aa, Artificial Sequence
  Description of Artificial Sequence: Synthetic peptide
DASYRAT

SEQ ID NO: 3186 - protein, 9 aa, Artificial Sequence
  Description of Artificial Sequence: Synthetic peptide
QQRGNWPIT

SEQ ID NO: 3187 - protein, 5 aa, Artificial Sequence
  Description of Artificial Sequence: Synthetic peptide
KYPMW

SEQ ID NO: 3188 - protein, 17 aa, Artificial Sequence
  Description of Artificial Sequence: Synthetic peptide
VIYPSGGYTAYADSVKG

SEQ ID NO: 3189 - protein, 15 aa, Artificial Sequence
  Description of Artificial Sequence: Synthetic peptide
DRAYGDYVGWNGFDY

SEQ ID NO: 3190 - protein, 11 aa, Artificial Sequence
  Description of Artificial Sequence: Synthetic peptide
RASQSISSFLA

SEQ ID NO: 3191 - protein, 7 aa, Artificial Sequence
  Description of Artificial Sequence: Synthetic peptide
DASYRAT

SEQ ID NO: 3192 - protein, 9 aa, Artificial Sequence
  Description of Artificial Sequence: Synthetic peptide
QQRGNWPIT

SEQ ID NO: 3193 - protein, 5 aa, Artificial Sequence
  Description of Artificial Sequence: Synthetic peptide
KYPMW

SEQ ID NO: 3194 - protein, 17 aa, Artificial Sequence
  Description of Artificial Sequence: Synthetic peptide
VIYSSGGGTFYADSVKG

SEQ ID NO: 3195 - protein, 15 aa, Artificial Sequence
  Description of Artificial Sequence: Synthetic peptide
DRAYGDYVGWNGFDY

SEQ ID NO: 3196 - protein, 11 aa, Artificial Sequence
  Description of Artificial Sequence: Synthetic peptide
RASQSISSFLA

SEQ ID NO: 3197 - protein, 7 aa, Artificial Sequence
  Description of Artificial Sequence: Synthetic peptide
DASYRAT

SEQ ID NO: 3198 - protein, 9 aa, Artificial Sequence
  Description of Artificial Sequence: Synthetic peptide
QQRGNWPIT

SEQ ID NO: 3199 - protein, 5 aa, Artificial Sequence
  Description of Artificial Sequence: Synthetic peptide
KYPMW

SEQ ID NO: 3200 - protein, 17 aa, Artificial Sequence
  Description of Artificial Sequence: Synthetic peptide
YISPSGGGTLYADSVKG

SEQ ID NO: 3201 - protein, 15 aa, Artificial Sequence
  Description of Artificial Sequence: Synthetic peptide
DRAYGDYVGWNGFDY

SEQ ID NO: 3202 - protein, 11 aa, Artificial Sequence
  Description of Artificial Sequence: Synthetic peptide
RASQSISSFLA

SEQ ID NO: 3203 - protein, 7 aa, Artificial Sequence
  Description of Artificial Sequence: Synthetic peptide
DASYRAT

SEQ ID NO: 3204 - protein, 9 aa, Artificial Sequence
  Description of Artificial Sequence: Synthetic peptide
QQRGNWPIT

SEQ ID NO: 3205 - protein, 5 aa, Artificial Sequence
  Description of Artificial Sequence: Synthetic peptide
KYPMW

SEQ ID NO: 3206 - protein, 17 aa, Artificial Sequence
  Description of Artificial Sequence: Synthetic peptide
YISPSGGGTYYADSVKG

SEQ ID NO: 3207 - protein, 15 aa, Artificial Sequence
  Description of Artificial Sequence: Synthetic peptide
DRAYGDYVGWNGFDY

SEQ ID NO: 3208 - protein, 11 aa, Artificial Sequence
  Description of Artificial Sequence: Synthetic peptide
RASQSISSFLA

SEQ ID NO: 3209 - protein, 7 aa, Artificial Sequence
  Description of Artificial Sequence: Synthetic peptide
DASYRAT

SEQ ID NO: 3210 - protein, 9 aa, Artificial Sequence
  Description of Artificial Sequence: Synthetic peptide
QQRGNWPIT

SEQ ID NO: 3211 - protein, 5 aa, Artificial Sequence
  Description of Artificial Sequence: Synthetic peptide
KYPMW

SEQ ID NO: 3212 - protein, 17 aa, Artificial Sequence
  Description of Artificial Sequence: Synthetic peptide
YISSSGGGTYYADSVKG

SEQ ID NO: 3213 - protein, 15 aa, Artificial Sequence
  Description of Artificial Sequence: Synthetic peptide
DRAYGDYVGWNGFDY

SEQ ID NO: 3214 - protein, 11 aa, Artificial Sequence
  Description of Artificial Sequence: Synthetic peptide
RASQSISSFLA

SEQ ID NO: 3215 - protein, 7 aa, Artificial Sequence
  Description of Artificial Sequence: Synthetic peptide
DASYRAT

SEQ ID NO: 3216 - protein, 9 aa, Artificial Sequence
  Description of Artificial Sequence: Synthetic peptide
QQRGNWPIT

SEQ ID NO: 3217 - protein, 5 aa, Artificial Sequence
  Description of Artificial Sequence: Synthetic peptide
KYPMW

SEQ ID NO: 3218 - protein, 17 aa, Artificial Sequence
  Description of Artificial Sequence: Synthetic peptide
YIVPSGGATFYADSVKG

SEQ ID NO: 3219 - protein, 15 aa, Artificial Sequence
  Description of Artificial Sequence: Synthetic peptide
DRAYGDYVGWNGFDY

SEQ ID NO: 3220 - protein, 11 aa, Artificial Sequence
  Description of Artificial Sequence: Synthetic peptide
RASQSISSFLA

SEQ ID NO: 3221 - protein, 7 aa, Artificial Sequence
  Description of Artificial Sequence: Synthetic peptide
DASYRAT

SEQ ID NO: 3222 - protein, 9 aa, Artificial Sequence
  Description of Artificial Sequence: Synthetic peptide
QQRGNWPIT

SEQ ID NO: 3223 - protein, 5 aa, Artificial Sequence
  Description of Artificial Sequence: Synthetic peptide
KYPMW

SEQ ID NO: 3224 - protein, 17 aa, Artificial Sequence
  Description of Artificial Sequence: Synthetic peptide
YIVPSGGPTWYADSVKG

SEQ ID NO: 3225 - protein, 15 aa, Artificial Sequence
  Description of Artificial Sequence: Synthetic peptide
DRAYGDYVGWNGFDY

SEQ ID NO: 3226 - protein, 11 aa, Artificial Sequence
  Description of Artificial Sequence: Synthetic peptide
RASQSISSFLA

SEQ ID NO: 3227 - protein, 7 aa, Artificial Sequence
  Description of Artificial Sequence: Synthetic peptide
DASYRAT

SEQ ID NO: 3228 - protein, 9 aa, Artificial Sequence
  Description of Artificial Sequence: Synthetic peptide
QQRGNWPIT

SEQ ID NO: 3229 - protein, 5 aa, Artificial Sequence
  Description of Artificial Sequence: Synthetic peptide
KYPMW

SEQ ID NO: 3230 - protein, 17 aa, Artificial Sequence
  Description of Artificial Sequence: Synthetic peptide
YIVPSGGWTAYADSVKG

SEQ ID NO: 3231 - protein, 15 aa, Artificial Sequence
  Description of Artificial Sequence: Synthetic peptide
DRAYGDYVGWNGFDY

SEQ ID NO: 3232 - protein, 11 aa, Artificial Sequence
  Description of Artificial Sequence: Synthetic peptide
RASQSISSFLA

SEQ ID NO: 3233 - protein, 7 aa, Artificial Sequence
  Description of Artificial Sequence: Synthetic peptide
DASYRAT

SEQ ID NO: 3234 - protein, 9 aa, Artificial Sequence
  Description of Artificial Sequence: Synthetic peptide
QQRGNWPIT

SEQ ID NO: 3235 - protein, 5 aa, Artificial Sequence
  Description of Artificial Sequence: Synthetic peptide
KYQMW

SEQ ID NO: 3236 - protein, 17 aa, Artificial Sequence
  Description of Artificial Sequence: Synthetic peptide
SIYPSGGATFYADSVKG

SEQ ID NO: 3237 - protein, 15 aa, Artificial Sequence
  Description of Artificial Sequence: Synthetic peptide
DRAYGDYVGWNGFDY

SEQ ID NO: 3238 - protein, 11 aa, Artificial Sequence
  Description of Artificial Sequence: Synthetic peptide
RASQSISSFLA

SEQ ID NO: 3239 - protein, 7 aa, Artificial Sequence
  Description of Artificial Sequence: Synthetic peptide
DASYRAT

SEQ ID NO: 3240 - protein, 9 aa, Artificial Sequence
  Description of Artificial Sequence: Synthetic peptide
QQRGNWPIT

SEQ ID NO: 3241 - protein, 5 aa, Artificial Sequence
  Description of Artificial Sequence: Synthetic peptide
KYQMW

SEQ ID NO: 3242 - protein, 17 aa, Artificial Sequence
  Description of Artificial Sequence: Synthetic peptide
SIYPSGGGTFYADSVKG

SEQ ID NO: 3243 - protein, 15 aa, Artificial Sequence
  Description of Artificial Sequence: Synthetic peptide
DRAYGDYVGWNGFDY

SEQ ID NO: 3244 - protein, 11 aa, Artificial Sequence
  Description of Artificial Sequence: Synthetic peptide
RASQSISSFLA

SEQ ID NO: 3245 - protein, 7 aa, Artificial Sequence
  Description of Artificial Sequence: Synthetic peptide
DASYRAT

SEQ ID NO: 3246 - protein, 9 aa, Artificial Sequence
  Description of Artificial Sequence: Synthetic peptide
QQRGNWPIT

SEQ ID NO: 3247 - protein, 5 aa, Artificial Sequence
  Description of Artificial Sequence: Synthetic peptide
KYSMI

SEQ ID NO: 3248 - protein, 17 aa, Artificial Sequence
  Description of Artificial Sequence: Synthetic peptide
YIVPSGGYTGYADSVKG

SEQ ID NO: 3249 - protein, 15 aa, Artificial Sequence
  Description of Artificial Sequence: Synthetic peptide
DRAYGDYVGWNGFDY

SEQ ID NO: 3250 - protein, 11 aa, Artificial Sequence
  Description of Artificial Sequence: Synthetic peptide
RASQSISSFLA

SEQ ID NO: 3251 - protein, 7 aa, Artificial Sequence
  Description of Artificial Sequence: Synthetic peptide
DASYRAT

SEQ ID NO: 3252 - protein, 9 aa, Artificial Sequence
  Description of Artificial Sequence: Synthetic peptide
QQRGNWPIT

SEQ ID NO: 3253 - protein, 5 aa, Artificial Sequence
  Description of Artificial Sequence: Synthetic peptide
KYSMW

SEQ ID NO: 3254 - protein, 17 aa, Artificial Sequence
  Description of Artificial Sequence: Synthetic peptide
SIYPSGGATFYADSVKG

SEQ ID NO: 3255 - protein, 15 aa, Artificial Sequence
  Description of Artificial Sequence: Synthetic peptide
DRAYGDYVGWNGFDY

SEQ ID NO: 3256 - protein, 11 aa, Artificial Sequence
  Description of Artificial Sequence: Synthetic peptide
RASQSISSFLA

SEQ ID NO: 3257 - protein, 7 aa, Artificial Sequence
  Description of Artificial Sequence: Synthetic peptide
DASYRAT

SEQ ID NO: 3258 - protein, 9 aa, Artificial Sequence
  Description of Artificial Sequence: Synthetic peptide
QQRGNWPIT

SEQ ID NO: 3259 - protein, 5 aa, Artificial Sequence
  Description of Artificial Sequence: Synthetic peptide
KYSMW

SEQ ID NO: 3260 - protein, 17 aa, Artificial Sequence
  Description of Artificial Sequence: Synthetic peptide
VIYPSGGATFYADSVKG

SEQ ID NO: 3261 - protein, 15 aa, Artificial Sequence
  Description of Artificial Sequence: Synthetic peptide
DRAYGDYVGWNGFDY

SEQ ID NO: 3262 - protein, 11 aa, Artificial Sequence
  Description of Artificial Sequence: Synthetic peptide
RASQSISSFLA

SEQ ID NO: 3263 - protein, 7 aa, Artificial Sequence
  Description of Artificial Sequence: Synthetic peptide
DASYRAT

SEQ ID NO: 3264 - protein, 9 aa, Artificial Sequence
  Description of Artificial Sequence: Synthetic peptide
QQRGNWPIT

SEQ ID NO: 3265 - protein, 5 aa, Artificial Sequence
  Description of Artificial Sequence: Synthetic peptide
KYSMW

SEQ ID NO: 3266 - protein, 17 aa, Artificial Sequence
  Description of Artificial Sequence: Synthetic peptide
VIYPSGGFTDYADSVKG

SEQ ID NO: 3267 - protein, 15 aa, Artificial Sequence
  Description of Artificial Sequence: Synthetic peptide
DRAYGDYVGWNGFDY

SEQ ID NO: 3268 - protein, 11 aa, Artificial Sequence
  Description of Artificial Sequence: Synthetic peptide
RASQSISSFLA

SEQ ID NO: 3269 - protein, 7 aa, Artificial Sequence
  Description of Artificial Sequence: Synthetic peptide
DASYRAT

SEQ ID NO: 3270 - protein, 9 aa, Artificial Sequence
  Description of Artificial Sequence: Synthetic peptide
QQRGNWPIT

SEQ ID NO: 3271 - protein, 5 aa, Artificial Sequence
  Description of Artificial Sequence: Synthetic peptide
KYTMW

SEQ ID NO: 3272 - protein, 17 aa, Artificial Sequence
  Description of Artificial Sequence: Synthetic peptide
VIYPSGGATFYADSVKG

SEQ ID NO: 3273 - protein, 15 aa, Artificial Sequence
  Description of Artificial Sequence: Synthetic peptide
DRAYGDYVGWNGFDY

SEQ ID NO: 3274 - protein, 11 aa, Artificial Sequence
  Description of Artificial Sequence: Synthetic peptide
RASQSISSFLA

SEQ ID NO: 3275 - protein, 7 aa, Artificial Sequence
  Description of Artificial Sequence: Synthetic peptide
DASYRAT

SEQ ID NO: 3276 - protein, 9 aa, Artificial Sequence
  Description of Artificial Sequence: Synthetic peptide
QQRGNWPIT

SEQ ID NO: 3277 - protein, 5 aa, Artificial Sequence
  Description of Artificial Sequence: Synthetic peptide
KYWMW

SEQ ID NO: 3278 - protein, 17 aa, Artificial Sequence
  Description of Artificial Sequence: Synthetic peptide
VIVPSGGMTYYADSVKG

SEQ ID NO: 3279 - protein, 15 aa, Artificial Sequence
  Description of Artificial Sequence: Synthetic peptide
DRAYGDYVGWNGFDY

SEQ ID NO: 3280 - protein, 11 aa, Artificial Sequence
  Description of Artificial Sequence: Synthetic peptide
RASQSISSFLA

SEQ ID NO: 3281 - protein, 7 aa, Artificial Sequence
  Description of Artificial Sequence: Synthetic peptide
DASYRAT

SEQ ID NO: 3282 - protein, 9 aa, Artificial Sequence
  Description of Artificial Sequence: Synthetic peptide
QQRGNWPIT

SEQ ID NO: 3283 - protein, 5 aa, Artificial Sequence
  Description of Artificial Sequence: Synthetic peptide
KYYMW

SEQ ID NO: 3284 - protein, 17 aa, Artificial Sequence
  Description of Artificial Sequence: Synthetic peptide
SIYSSGGGTFYADSVKG

SEQ ID NO: 3285 - protein, 15 aa, Artificial Sequence
  Description of Artificial Sequence: Synthetic peptide
DRAYGDYVGWNGFDY

SEQ ID NO: 3286 - protein, 11 aa, Artificial Sequence
  Description of Artificial Sequence: Synthetic peptide
RASQSISSFLA

SEQ ID NO: 3287 - protein, 7 aa, Artificial Sequence
  Description of Artificial Sequence: Synthetic peptide
DASYRAT

SEQ ID NO: 3288 - protein, 9 aa, Artificial Sequence
  Description of Artificial Sequence: Synthetic peptide
QQRGNWPIT

SEQ ID NO: 3289 - protein, 5 aa, Artificial Sequence
  Description of Artificial Sequence: Synthetic peptide
LYAMI

SEQ ID NO: 3290 - protein, 17 aa, Artificial Sequence
  Description of Artificial Sequence: Synthetic peptide
YISPSGGFTGYADSVKG

SEQ ID NO: 3291 - protein, 15 aa, Artificial Sequence
  Description of Artificial Sequence: Synthetic peptide
DRAYGDYVGWNGFDY

SEQ ID NO: 3292 - protein, 11 aa, Artificial Sequence
  Description of Artificial Sequence: Synthetic peptide
RASQSISSFLA

SEQ ID NO: 3293 - protein, 7 aa, Artificial Sequence
  Description of Artificial Sequence: Synthetic peptide
DASYRAT

SEQ ID NO: 3294 - protein, 9 aa, Artificial Sequence
  Description of Artificial Sequence: Synthetic peptide
QQRGNWPIT

SEQ ID NO: 3295 - protein, 5 aa, Artificial Sequence
  Description of Artificial Sequence: Synthetic peptide
LYAMW

SEQ ID NO: 3296 - protein, 17 aa, Artificial Sequence
  Description of Artificial Sequence: Synthetic peptide
SIVPSGGKTYYADSVKG

SEQ ID NO: 3297 - protein, 15 aa, Artificial Sequence
  Description of Artificial Sequence: Synthetic peptide
DRAYGDYVGWNGFDY

SEQ ID NO: 3298 - protein, 11 aa, Artificial Sequence
  Description of Artificial Sequence: Synthetic peptide
RASQSISSFLA

SEQ ID NO: 3299 - protein, 7 aa, Artificial Sequence
  Description of Artificial Sequence: Synthetic peptide
DASYRAT

SEQ ID NO: 3300 - protein, 9 aa, Artificial Sequence
  Description of Artificial Sequence: Synthetic peptide
QQRGNWPIT

SEQ ID NO: 3301 - protein, 5 aa, Artificial Sequence
  Description of Artificial Sequence: Synthetic peptide
LYAMW

SEQ ID NO: 3302 - protein, 17 aa, Artificial Sequence
  Description of Artificial Sequence: Synthetic peptide
YIYPSGGGTYYADSVKG

SEQ ID NO: 3303 - protein, 15 aa, Artificial Sequence
  Description of Artificial Sequence: Synthetic peptide
DRAYGDYVGWNGFDY

SEQ ID NO: 3304 - protein, 11 aa, Artificial Sequence
  Description of Artificial Sequence: Synthetic peptide
RASQSISSFLA

SEQ ID NO: 3305 - protein, 7 aa, Artificial Sequence
  Description of Artificial Sequence: Synthetic peptide
DASYRAT

SEQ ID NO: 3306 - protein, 9 aa, Artificial Sequence
  Description of Artificial Sequence: Synthetic peptide
QQRGNWPIT

SEQ ID NO: 3307 - protein, 5 aa, Artificial Sequence
  Description of Artificial Sequence: Synthetic peptide
LYDML

SEQ ID NO: 3308 - protein, 17 aa, Artificial Sequence
  Description of Artificial Sequence: Synthetic peptide
YIYPSGGFTGYADSVKG

SEQ ID NO: 3309 - protein, 15 aa, Artificial Sequence
  Description of Artificial Sequence: Synthetic peptide
DRAYGDYVGWNGFDY

SEQ ID NO: 3310 - protein, 11 aa, Artificial Sequence
  Description of Artificial Sequence: Synthetic peptide
RASQSISSFLA

SEQ ID NO: 3311 - protein, 7 aa, Artificial Sequence
  Description of Artificial Sequence: Synthetic peptide
DASYRAT

SEQ ID NO: 3312 - protein, 9 aa, Artificial Sequence
  Description of Artificial Sequence: Synthetic peptide
QQRGNWPIT

SEQ ID NO: 3313 - protein, 5 aa, Artificial Sequence
  Description of Artificial Sequence: Synthetic peptide
LYDMV

SEQ ID NO: 3314 - protein, 17 aa, Artificial Sequence
  Description of Artificial Sequence: Synthetic peptide
WIGPSGGLTIYADSVKG

SEQ ID NO: 3315 - protein, 15 aa, Artificial Sequence
  Description of Artificial Sequence: Synthetic peptide
DRAYGDYVGWNGFDY

SEQ ID NO: 3316 - protein, 11 aa, Artificial Sequence
  Description of Artificial Sequence: Synthetic peptide
RASQSISSFLA

SEQ ID NO: 3317 - protein, 7 aa, Artificial Sequence
  Description of Artificial Sequence: Synthetic peptide
DASYRAT

SEQ ID NO: 3318 - protein, 9 aa, Artificial Sequence
  Description of Artificial Sequence: Synthetic peptide
QQRGNWPIT

SEQ ID NO: 3319 - protein, 5 aa, Artificial Sequence
  Description of Artificial Sequence: Synthetic peptide
LYDMW

SEQ ID NO: 3320 - protein, 17 aa, Artificial Sequence
  Description of Artificial Sequence: Synthetic peptide
SISSSGGYTGYADSVKG

SEQ ID NO: 3321 - protein, 15 aa, Artificial Sequence
  Description of Artificial Sequence: Synthetic peptide
DRAYGDYVGWNGFDY

SEQ ID NO: 3322 - protein, 11 aa, Artificial Sequence
  Description of Artificial Sequence: Synthetic peptide
RASQSISSFLA

SEQ ID NO: 3323 - protein, 7 aa, Artificial Sequence
  Description of Artificial Sequence: Synthetic peptide
DASYRAT

SEQ ID NO: 3324 - protein, 9 aa, Artificial Sequence
  Description of Artificial Sequence: Synthetic peptide
QQRGNWPIT

SEQ ID NO: 3325 - protein, 5 aa, Artificial Sequence
  Description of Artificial Sequence: Synthetic peptide
LYDMW

SEQ ID NO: 3326 - protein, 17 aa, Artificial Sequence
  Description of Artificial Sequence: Synthetic peptide
VIRPSGGSTYYADSVKG

SEQ ID NO: 3327 - protein, 15 aa, Artificial Sequence
  Description of Artificial Sequence: Synthetic peptide
DRAYGDYVGWNGFDY

SEQ ID NO: 3328 - protein, 11 aa, Artificial Sequence
  Description of Artificial Sequence: Synthetic peptide
RASQSISSFLA

SEQ ID NO: 3329 - protein, 7 aa, Artificial Sequence
  Description of Artificial Sequence: Synthetic peptide
DASYRAT

SEQ ID NO: 3330 - protein, 9 aa, Artificial Sequence
  Description of Artificial Sequence: Synthetic peptide
QQRGNWPIT

SEQ ID NO: 3331 - protein, 5 aa, Artificial Sequence
  Description of Artificial Sequence: Synthetic peptide
LYDMW

SEQ ID NO: 3332 - protein, 17 aa, Artificial Sequence
  Description of Artificial Sequence: Synthetic peptide
VIYPSGGPTYYADSVKG

SEQ ID NO: 3333 - protein, 15 aa, Artificial Sequence
  Description of Artificial Sequence: Synthetic peptide
DRAYGDYVGWNGFDY

SEQ ID NO: 3334 - protein, 11 aa, Artificial Sequence
  Description of Artificial Sequence: Synthetic peptide
RASQSISSFLA

SEQ ID NO: 3335 - protein, 7 aa, Artificial Sequence
  Description of Artificial Sequence: Synthetic peptide
DASYRAT

SEQ ID NO: 3336 - protein, 9 aa, Artificial Sequence
  Description of Artificial Sequence: Synthetic peptide
QQRGNWPIT

SEQ ID NO: 3337 - protein, 5 aa, Artificial Sequence
  Description of Artificial Sequence: Synthetic peptide
LYDMW

SEQ ID NO: 3338 - protein, 17 aa, Artificial Sequence
  Description of Artificial Sequence: Synthetic peptide
VIYSSGGATFYADSVKG

SEQ ID NO: 3339 - protein, 15 aa, Artificial Sequence
  Description of Artificial Sequence: Synthetic peptide
DRAYGDYVGWNGFDY

SEQ ID NO: 3340 - protein, 11 aa, Artificial Sequence
  Description of Artificial Sequence: Synthetic peptide
RASQSISSFLA

SEQ ID NO: 3341 - protein, 7 aa, Artificial Sequence
  Description of Artificial Sequence: Synthetic peptide
DASYRAT

SEQ ID NO: 3342 - protein, 9 aa, Artificial Sequence
  Description of Artificial Sequence: Synthetic peptide
QQRGNWPIT

SEQ ID NO: 3343 - protein, 5 aa, Artificial Sequence
  Description of Artificial Sequence: Synthetic peptide
LYDMW

SEQ ID NO: 3344 - protein, 17 aa, Artificial Sequence
  Description of Artificial Sequence: Synthetic peptide
VIYSSGGTTFYADSVKG

SEQ ID NO: 3345 - protein, 15 aa, Artificial Sequence
  Description of Artificial Sequence: Synthetic peptide
DRAYGDYVGWNGFDY

SEQ ID NO: 3346 - protein, 11 aa, Artificial Sequence
  Description of Artificial Sequence: Synthetic peptide
RASQSISSFLA

SEQ ID NO: 3347 - protein, 7 aa, Artificial Sequence
  Description of Artificial Sequence: Synthetic peptide
DASYRAT

SEQ ID NO: 3348 - protein, 9 aa, Artificial Sequence
  Description of Artificial Sequence: Synthetic peptide
QQRGNWPIT

SEQ ID NO: 3349 - protein, 5 aa, Artificial Sequence
  Description of Artificial Sequence: Synthetic peptide
LYDMW

SEQ ID NO: 3350 - protein, 17 aa, Artificial Sequence
  Description of Artificial Sequence: Synthetic peptide
VIYSSGGYTAYADSVKG

SEQ ID NO: 3351 - protein, 15 aa, Artificial Sequence
  Description of Artificial Sequence: Synthetic peptide
DRAYGDYVGWNGFDY

SEQ ID NO: 3352 - protein, 11 aa, Artificial Sequence
  Description of Artificial Sequence: Synthetic peptide
RASQSISSFLA

SEQ ID NO: 3353 - protein, 7 aa, Artificial Sequence
  Description of Artificial Sequence: Synthetic peptide
DASYRAT

SEQ ID NO: 3354 - protein, 9 aa, Artificial Sequence
  Description of Artificial Sequence: Synthetic peptide
QQRGNWPIT

SEQ ID NO: 3355 - protein, 5 aa, Artificial Sequence
  Description of Artificial Sequence: Synthetic peptide
LYDMW

SEQ ID NO: 3356 - protein, 17 aa, Artificial Sequence
  Description of Artificial Sequence: Synthetic peptide
VIYSSGGYTGYADSVKG

SEQ ID NO: 3357 - protein, 15 aa, Artificial Sequence
  Description of Artificial Sequence: Synthetic peptide
DRAYGDYVGWNGFDY

SEQ ID NO: 3358 - protein, 11 aa, Artificial Sequence
  Description of Artificial Sequence: Synthetic peptide
RASQSISSFLA

SEQ ID NO: 3359 - protein, 7 aa, Artificial Sequence
  Description of Artificial Sequence: Synthetic peptide
DASYRAT

SEQ ID NO: 3360 - protein, 9 aa, Artificial Sequence
  Description of Artificial Sequence: Synthetic peptide
QQRGNWPIT

SEQ ID NO: 3361 - protein, 5 aa, Artificial Sequence
  Description of Artificial Sequence: Synthetic peptide
LYDMW

SEQ ID NO: 3362 - protein, 17 aa, Artificial Sequence
  Description of Artificial Sequence: Synthetic peptide
YIGPSGGNTLYADSVKG

SEQ ID NO: 3363 - protein, 15 aa, Artificial Sequence
  Description of Artificial Sequence: Synthetic peptide
DRAYGDYVGWNGFDY

SEQ ID NO: 3364 - protein, 11 aa, Artificial Sequence
  Description of Artificial Sequence: Synthetic peptide
RASQSISSFLA

SEQ ID NO: 3365 - protein, 7 aa, Artificial Sequence
  Description of Artificial Sequence: Synthetic peptide
DASYRAT

SEQ ID NO: 3366 - protein, 9 aa, Artificial Sequence
  Description of Artificial Sequence: Synthetic peptide
QQRGNWPIT

SEQ ID NO: 3367 - protein, 5 aa, Artificial Sequence
  Description of Artificial Sequence: Synthetic peptide
LYEMW

SEQ ID NO: 3368 - protein, 17 aa, Artificial Sequence
  Description of Artificial Sequence: Synthetic peptide
VISPSGGGTYYADSVKG

SEQ ID NO: 3369 - protein, 15 aa, Artificial Sequence
  Description of Artificial Sequence: Synthetic peptide
DRAYGDYVGWNGFDY

SEQ ID NO: 3370 - protein, 11 aa, Artificial Sequence
  Description of Artificial Sequence: Synthetic peptide
RASQSISSFLA

SEQ ID NO: 3371 - protein, 7 aa, Artificial Sequence
  Description of Artificial Sequence: Synthetic peptide
DASYRAT

SEQ ID NO: 3372 - protein, 9 aa, Artificial Sequence
  Description of Artificial Sequence: Synthetic peptide
QQRGNWPIT

SEQ ID NO: 3373 - protein, 5 aa, Artificial Sequence
  Description of Artificial Sequence: Synthetic peptide
LYEMW

SEQ ID NO: 3374 - protein, 17 aa, Artificial Sequence
  Description of Artificial Sequence: Synthetic peptide
YISSSGGGTLYADSVKG

SEQ ID NO: 3375 - protein, 15 aa, Artificial Sequence
  Description of Artificial Sequence: Synthetic peptide
DRAYGDYVGWNGFDY

SEQ ID NO: 3376 - protein, 11 aa, Artificial Sequence
  Description of Artificial Sequence: Synthetic peptide
RASQSISSFLA

SEQ ID NO: 3377 - protein, 7 aa, Artificial Sequence
  Description of Artificial Sequence: Synthetic peptide
DASYRAT

SEQ ID NO: 3378 - protein, 9 aa, Artificial Sequence
  Description of Artificial Sequence: Synthetic peptide
QQRGNWPIT

SEQ ID NO: 3379 - protein, 5 aa, Artificial Sequence
  Description of Artificial Sequence: Synthetic peptide
LYMMW

SEQ ID NO: 3380 - protein, 16 aa, Artificial Sequence
  Description of Artificial Sequence: Synthetic peptide
SIYPSGGTYYADSVKG

SEQ ID NO: 3381 - protein, 15 aa, Artificial Sequence
  Description of Artificial Sequence: Synthetic peptide
DRAYGDYVGWNGFDY

SEQ ID NO: 3382 - protein, 11 aa, Artificial Sequence
  Description of Artificial Sequence: Synthetic peptide
RASQSISSFLA

SEQ ID NO: 3383 - protein, 7 aa, Artificial Sequence
  Description of Artificial Sequence: Synthetic peptide
DASYRAT

SEQ ID NO: 3384 - protein, 9 aa, Artificial Sequence
  Description of Artificial Sequence: Synthetic peptide
QQRGNWPIT

SEQ ID NO: 3385 - protein, 5 aa, Artificial Sequence
  Description of Artificial Sequence: Synthetic peptide
LYNMW

SEQ ID NO: 3386 - protein, 17 aa, Artificial Sequence
  Description of Artificial Sequence: Synthetic peptide
VIYPSGGYTGYADSVKG

SEQ ID NO: 3387 - protein, 15 aa, Artificial Sequence
  Description of Artificial Sequence: Synthetic peptide
DRAYGDYVGWNGFDY

SEQ ID NO: 3388 - protein, 11 aa, Artificial Sequence
  Description of Artificial Sequence: Synthetic peptide
RASQSISSFLA

SEQ ID NO: 3389 - protein, 7 aa, Artificial Sequence
  Description of Artificial Sequence: Synthetic peptide
DASYRAT

SEQ ID NO: 3390 - protein, 9 aa, Artificial Sequence
  Description of Artificial Sequence: Synthetic peptide
QQRGNWPIT

SEQ ID NO: 3391 - protein, 5 aa, Artificial Sequence
  Description of Artificial Sequence: Synthetic peptide
LYPMI

SEQ ID NO: 3392 - protein, 17 aa, Artificial Sequence
  Description of Artificial Sequence: Synthetic peptide
YISPSGGFTDYADSVKG

SEQ ID NO: 3393 - protein, 15 aa, Artificial Sequence
  Description of Artificial Sequence: Synthetic peptide
DRAYGDYVGWNGFDY

SEQ ID NO: 3394 - protein, 11 aa, Artificial Sequence
  Description of Artificial Sequence: Synthetic peptide
RASQSISSFLA

SEQ ID NO: 3395 - protein, 7 aa, Artificial Sequence
  Description of Artificial Sequence: Synthetic peptide
DASYRAT

SEQ ID NO: 3396 - protein, 9 aa, Artificial Sequence
  Description of Artificial Sequence: Synthetic peptide
QQRGNWPIT

SEQ ID NO: 3397 - protein, 5 aa, Artificial Sequence
  Description of Artificial Sequence: Synthetic peptide
LYPMM

SEQ ID NO: 3398 - protein, 17 aa, Artificial Sequence
  Description of Artificial Sequence: Synthetic peptide
YIYPSGGGTFYADSVKG

SEQ ID NO: 3399 - protein, 15 aa, Artificial Sequence
  Description of Artificial Sequence: Synthetic peptide
DRAYGDYVGWNGFDY

SEQ ID NO: 3400 - protein, 11 aa, Artificial Sequence
  Description of Artificial Sequence: Synthetic peptide
RASQSISSFLA

SEQ ID NO: 3401 - protein, 7 aa, Artificial Sequence
  Description of Artificial Sequence: Synthetic peptide
DASYRAT

SEQ ID NO: 3402 - protein, 9 aa, Artificial Sequence
  Description of Artificial Sequence: Synthetic peptide
QQRGNWPIT

SEQ ID NO: 3403 - protein, 5 aa, Artificial Sequence
  Description of Artificial Sequence: Synthetic peptide
LYPMW

SEQ ID NO: 3404 - protein, 17 aa, Artificial Sequence
  Description of Artificial Sequence: Synthetic peptide
SISPSGGATFYADSVKG

SEQ ID NO: 3405 - protein, 15 aa, Artificial Sequence
  Description of Artificial Sequence: Synthetic peptide
DRAYGDYVGWNGFDY

SEQ ID NO: 3406 - protein, 11 aa, Artificial Sequence
  Description of Artificial Sequence: Synthetic peptide
RASQSISSFLA

SEQ ID NO: 3407 - protein, 7 aa, Artificial Sequence
  Description of Artificial Sequence: Synthetic peptide
DASYRAT

SEQ ID NO: 3408 - protein, 9 aa, Artificial Sequence
  Description of Artificial Sequence: Synthetic peptide
QQRGNWPIT

SEQ ID NO: 3409 - protein, 5 aa, Artificial Sequence
  Description of Artificial Sequence: Synthetic peptide
LYPMW

SEQ ID NO: 3410 - protein, 17 aa, Artificial Sequence
  Description of Artificial Sequence: Synthetic peptide
SISPSGGGTFYADSVKG

SEQ ID NO: 3411 - protein, 15 aa, Artificial Sequence
  Description of Artificial Sequence: Synthetic peptide
DRAYGDYVGWNGFDY

SEQ ID NO: 3412 - protein, 11 aa, Artificial Sequence
  Description of Artificial Sequence: Synthetic peptide
RASQSISSFLA

SEQ ID NO: 3413 - protein, 7 aa, Artificial Sequence
  Description of Artificial Sequence: Synthetic peptide
DASYRAT

SEQ ID NO: 3414 - protein, 9 aa, Artificial Sequence
  Description of Artificial Sequence: Synthetic peptide
QQRGNWPIT

SEQ ID NO: 3415 - protein, 5 aa, Artificial Sequence
  Description of Artificial Sequence: Synthetic peptide
LYPMW

SEQ ID NO: 3416 - protein, 17 aa, Artificial Sequence
  Description of Artificial Sequence: Synthetic peptide
SIYPSGGATFYADSVKG

SEQ ID NO: 3417 - protein, 15 aa, Artificial Sequence
  Description of Artificial Sequence: Synthetic peptide
DRAYGDYVGWNGFDY

SEQ ID NO: 3418 - protein, 11 aa, Artificial Sequence
  Description of Artificial Sequence: Synthetic peptide
RASQSISSFLA

SEQ ID NO: 3419 - protein, 7 aa, Artificial Sequence
  Description of Artificial Sequence: Synthetic peptide
DASYRAT

SEQ ID NO: 3420 - protein, 9 aa, Artificial Sequence
  Description of Artificial Sequence: Synthetic peptide
QQRGNWPIT

SEQ ID NO: 3421 - protein, 5 aa, Artificial Sequence
  Description of Artificial Sequence: Synthetic peptide
LYPMW

SEQ ID NO: 3422 - protein, 17 aa, Artificial Sequence
  Description of Artificial Sequence: Synthetic peptide
VIYSSGGATFYADSVKG

SEQ ID NO: 3423 - protein, 15 aa, Artificial Sequence
  Description of Artificial Sequence: Synthetic peptide
DRAYGDYVGWNGFDY

SEQ ID NO: 3424 - protein, 11 aa, Artificial Sequence
  Description of Artificial Sequence: Synthetic peptide
RASQSISSFLA

SEQ ID NO: 3425 - protein, 7 aa, Artificial Sequence
  Description of Artificial Sequence: Synthetic peptide
DASYRAT

SEQ ID NO: 3426 - protein, 9 aa, Artificial Sequence
  Description of Artificial Sequence: Synthetic peptide
QQRGNWPIT

SEQ ID NO: 3427 - protein, 5 aa, Artificial Sequence
  Description of Artificial Sequence: Synthetic peptide
LYPMW

SEQ ID NO: 3428 - protein, 17 aa, Artificial Sequence
  Description of Artificial Sequence: Synthetic peptide
WIVPSGGFTLYADSVKG

SEQ ID NO: 3429 - protein, 15 aa, Artificial Sequence
  Description of Artificial Sequence: Synthetic peptide
DRAYGDYVGWNGFDY

SEQ ID NO: 3430 - protein, 11 aa, Artificial Sequence
  Description of Artificial Sequence: Synthetic peptide
RASQSISSFLA

SEQ ID NO: 3431 - protein, 7 aa, Artificial Sequence
  Description of Artificial Sequence: Synthetic peptide
DASYRAT

SEQ ID NO: 3432 - protein, 9 aa, Artificial Sequence
  Description of Artificial Sequence: Synthetic peptide
QQRGNWPIT

SEQ ID NO: 3433 - protein, 5 aa, Artificial Sequence
  Description of Artificial Sequence: Synthetic peptide
LYPMW

SEQ ID NO: 3434 - protein, 17 aa, Artificial Sequence
  Description of Artificial Sequence: Synthetic peptide
YISPSGGGTLYADSVKG

SEQ ID NO: 3435 - protein, 15 aa, Artificial Sequence
  Description of Artificial Sequence: Synthetic peptide
DRAYGDYVGWNGFDY

SEQ ID NO: 3436 - protein, 11 aa, Artificial Sequence
  Description of Artificial Sequence: Synthetic peptide
RASQSISSFLA

SEQ ID NO: 3437 - protein, 7 aa, Artificial Sequence
  Description of Artificial Sequence: Synthetic peptide
DASYRAT

SEQ ID NO: 3438 - protein, 9 aa, Artificial Sequence
  Description of Artificial Sequence: Synthetic peptide
QQRGNWPIT

SEQ ID NO: 3439 - protein, 5 aa, Artificial Sequence
  Description of Artificial Sequence: Synthetic peptide
LYPMW

SEQ ID NO: 3440 - protein, 17 aa, Artificial Sequence
  Description of Artificial Sequence: Synthetic peptide
YISSSGGGTYYADSVKG

SEQ ID NO: 3441 - protein, 15 aa, Artificial Sequence
  Description of Artificial Sequence: Synthetic peptide
DRAYGDYVGWNGFDY

SEQ ID NO: 3442 - protein, 11 aa, Artificial Sequence
  Description of Artificial Sequence: Synthetic peptide
RASQSISSFLA

SEQ ID NO: 3443 - protein, 7 aa, Artificial Sequence
  Description of Artificial Sequence: Synthetic peptide
DASYRAT

SEQ ID NO: 3444 - protein, 9 aa, Artificial Sequence
  Description of Artificial Sequence: Synthetic peptide
QQRGNWPIT

SEQ ID NO: 3445 - protein, 5 aa, Artificial Sequence
  Description of Artificial Sequence: Synthetic peptide
LYPMW

SEQ ID NO: 3446 - protein, 17 aa, Artificial Sequence
  Description of Artificial Sequence: Synthetic peptide
YIVPSGGGTFYADSVKG

SEQ ID NO: 3447 - protein, 15 aa, Artificial Sequence
  Description of Artificial Sequence: Synthetic peptide
DRAYGDYVGWNGFDY

SEQ ID NO: 3448 - protein, 11 aa, Artificial Sequence
  Description of Artificial Sequence: Synthetic peptide
RASQSISSFLA

SEQ ID NO: 3449 - protein, 7 aa, Artificial Sequence
  Description of Artificial Sequence: Synthetic peptide
DASYRAT

SEQ ID NO: 3450 - protein, 9 aa, Artificial Sequence
  Description of Artificial Sequence: Synthetic peptide
QQRGNWPIT

SEQ ID NO: 3451 - protein, 5 aa, Artificial Sequence
  Description of Artificial Sequence: Synthetic peptide
LYPMW

SEQ ID NO: 3452 - protein, 17 aa, Artificial Sequence
  Description of Artificial Sequence: Synthetic peptide
YIVSSGGATFYADSVKG

SEQ ID NO: 3453 - protein, 15 aa, Artificial Sequence
  Description of Artificial Sequence: Synthetic peptide
DRAYGDYVGWNGFDY

SEQ ID NO: 3454 - protein, 11 aa, Artificial Sequence
  Description of Artificial Sequence: Synthetic peptide
RASQSISSFLA

SEQ ID NO: 3455 - protein, 7 aa, Artificial Sequence
  Description of Artificial Sequence: Synthetic peptide
DASYRAT

SEQ ID NO: 3456 - protein, 9 aa, Artificial Sequence
  Description of Artificial Sequence: Synthetic peptide
QQRGNWPIT

SEQ ID NO: 3457 - protein, 5 aa, Artificial Sequence
  Description of Artificial Sequence: Synthetic peptide
LYPMW

SEQ ID NO: 3458 - protein, 17 aa, Artificial Sequence
  Description of Artificial Sequence: Synthetic peptide
YIYPSGGATMYADSVKG

SEQ ID NO: 3459 - protein, 15 aa, Artificial Sequence
  Description of Artificial Sequence: Synthetic peptide
DRAYGDYVGWNGFDY

SEQ ID NO: 3460 - protein, 11 aa, Artificial Sequence
  Description of Artificial Sequence: Synthetic peptide
RASQSISSFLA

SEQ ID NO: 3461 - protein, 7 aa, Artificial Sequence
  Description of Artificial Sequence: Synthetic peptide
DASYRAT

SEQ ID NO: 3462 - protein, 9 aa, Artificial Sequence
  Description of Artificial Sequence: Synthetic peptide
QQRGNWPIT

SEQ ID NO: 3463 - protein, 5 aa, Artificial Sequence
  Description of Artificial Sequence: Synthetic peptide
LYQMW

SEQ ID NO: 3464 - protein, 17 aa, Artificial Sequence
  Description of Artificial Sequence: Synthetic peptide
VIYPSGGATYYADSVKG

SEQ ID NO: 3465 - protein, 15 aa, Artificial Sequence
  Description of Artificial Sequence: Synthetic peptide
DRAYGDYVGWNGFDY

SEQ ID NO: 3466 - protein, 11 aa, Artificial Sequence
  Description of Artificial Sequence: Synthetic peptide
RASQSISSFLA

SEQ ID NO: 3467 - protein, 7 aa, Artificial Sequence
  Description of Artificial Sequence: Synthetic peptide
DASYRAT

SEQ ID NO: 3468 - protein, 9 aa, Artificial Sequence
  Description of Artificial Sequence: Synthetic peptide
QQRGNWPIT

SEQ ID NO: 3469 - protein, 5 aa, Artificial Sequence
  Description of Artificial Sequence: Synthetic peptide
LYQMW

SEQ ID NO: 3470 - protein, 16 aa, Artificial Sequence
  Description of Artificial Sequence: Synthetic peptide
VIYPSGGTFYADSVKG

SEQ ID NO: 3471 - protein, 15 aa, Artificial Sequence
  Description of Artificial Sequence: Synthetic peptide
DRAYGDYVGWNGFDY

SEQ ID NO: 3472 - protein, 11 aa, Artificial Sequence
  Description of Artificial Sequence: Synthetic peptide
RASQSISSFLA

SEQ ID NO: 3473 - protein, 7 aa, Artificial Sequence
  Description of Artificial Sequence: Synthetic peptide
DASYRAT

SEQ ID NO: 3474 - protein, 9 aa, Artificial Sequence
  Description of Artificial Sequence: Synthetic peptide
QQRGNWPIT

SEQ ID NO: 3475 - protein, 5 aa, Artificial Sequence
  Description of Artificial Sequence: Synthetic peptide
MYDMW

SEQ ID NO: 3476 - protein, 17 aa, Artificial Sequence
  Description of Artificial Sequence: Synthetic peptide
VISPSGGGTFYADSVKG

SEQ ID NO: 3477 - protein, 15 aa, Artificial Sequence
  Description of Artificial Sequence: Synthetic peptide
DRAYGDYVGWNGFDY

SEQ ID NO: 3478 - protein, 11 aa, Artificial Sequence
  Description of Artificial Sequence: Synthetic peptide
RASQSISSFLA

SEQ ID NO: 3479 - protein, 7 aa, Artificial Sequence
  Description of Artificial Sequence: Synthetic peptide
DASYRAT

SEQ ID NO: 3480 - protein, 9 aa, Artificial Sequence
  Description of Artificial Sequence: Synthetic peptide
QQRGNWPIT

SEQ ID NO: 3481 - protein, 5 aa, Artificial Sequence
  Description of Artificial Sequence: Synthetic peptide
MYDMW

SEQ ID NO: 3482 - protein, 17 aa, Artificial Sequence
  Description of Artificial Sequence: Synthetic peptide
VIYPSGGNTLYADSVKG

SEQ ID NO: 3483 - protein, 15 aa, Artificial Sequence
  Description of Artificial Sequence: Synthetic peptide
DRAYGDYVGWNGFDY

SEQ ID NO: 3484 - protein, 11 aa, Artificial Sequence
  Description of Artificial Sequence: Synthetic peptide
RASQSISSFLA

SEQ ID NO: 3485 - protein, 7 aa, Artificial Sequence
  Description of Artificial Sequence: Synthetic peptide
DASYRAT

SEQ ID NO: 3486 - protein, 9 aa, Artificial Sequence
  Description of Artificial Sequence: Synthetic peptide
QQRGNWPIT

SEQ ID NO: 3487 - protein, 5 aa, Artificial Sequence
  Description of Artificial Sequence: Synthetic peptide
MYDMW

SEQ ID NO: 3488 - protein, 17 aa, Artificial Sequence
  Description of Artificial Sequence: Synthetic peptide
VIYPSGGPTFYADSVKG

SEQ ID NO: 3489 - protein, 15 aa, Artificial Sequence
  Description of Artificial Sequence: Synthetic peptide
DRAYGDYVGWNGFDY

SEQ ID NO: 3490 - protein, 11 aa, Artificial Sequence
  Description of Artificial Sequence: Synthetic peptide
RASQSISSFLA

SEQ ID NO: 3491 - protein, 7 aa, Artificial Sequence
  Description of Artificial Sequence: Synthetic peptide
DASYRAT

SEQ ID NO: 3492 - protein, 9 aa, Artificial Sequence
  Description of Artificial Sequence: Synthetic peptide
QQRGNWPIT

SEQ ID NO: 3493 - protein, 5 aa, Artificial Sequence
  Description of Artificial Sequence: Synthetic peptide
MYDMW

SEQ ID NO: 3494 - protein, 17 aa, Artificial Sequence
  Description of Artificial Sequence: Synthetic peptide
VIYPSGGYTAYADSVKG

SEQ ID NO: 3495 - protein, 15 aa, Artificial Sequence
  Description of Artificial Sequence: Synthetic peptide
DRAYGDYVGWNGFDY

SEQ ID NO: 3496 - protein, 11 aa, Artificial Sequence
  Description of Artificial Sequence: Synthetic peptide
RASQSISSFLA

SEQ ID NO: 3497 - protein, 7 aa, Artificial Sequence
  Description of Artificial Sequence: Synthetic peptide
DASYRAT

SEQ ID NO: 3498 - protein, 9 aa, Artificial Sequence
  Description of Artificial Sequence: Synthetic peptide
QQRGNWPIT

SEQ ID NO: 3499 - protein, 5 aa, Artificial Sequence
  Description of Artificial Sequence: Synthetic peptide
MYDMW

SEQ ID NO: 3500 - protein, 17 aa, Artificial Sequence
  Description of Artificial Sequence: Synthetic peptide
VIYSSGGFTDYADSVKG

SEQ ID NO: 3501 - protein, 15 aa, Artificial Sequence
  Description of Artificial Sequence: Synthetic peptide
DRAYGDYVGWNGFDY

SEQ ID NO: 3502 - protein, 11 aa, Artificial Sequence
  Description of Artificial Sequence: Synthetic peptide
RASQSISSFLA

SEQ ID NO: 3503 - protein, 7 aa, Artificial Sequence
  Description of Artificial Sequence: Synthetic peptide
DASYRAT

SEQ ID NO: 3504 - protein, 9 aa, Artificial Sequence
  Description of Artificial Sequence: Synthetic peptide
QQRGNWPIT

SEQ ID NO: 3505 - protein, 5 aa, Artificial Sequence
  Description of Artificial Sequence: Synthetic peptide
MYDMW

SEQ ID NO: 3506 - protein, 17 aa, Artificial Sequence
  Description of Artificial Sequence: Synthetic peptide
VIYSSGGPTFYADSVKG

SEQ ID NO: 3507 - protein, 15 aa, Artificial Sequence
  Description of Artificial Sequence: Synthetic peptide
DRAYGDYVGWNGFDY

SEQ ID NO: 3508 - protein, 11 aa, Artificial Sequence
  Description of Artificial Sequence: Synthetic peptide
RASQSISSFLA

SEQ ID NO: 3509 - protein, 7 aa, Artificial Sequence
  Description of Artificial Sequence: Synthetic peptide
DASYRAT

SEQ ID NO: 3510 - protein, 9 aa, Artificial Sequence
  Description of Artificial Sequence: Synthetic peptide
QQRGNWPIT

SEQ ID NO: 3511 - protein, 5 aa, Artificial Sequence
  Description of Artificial Sequence: Synthetic peptide
MYDMW

SEQ ID NO: 3512 - protein, 17 aa, Artificial Sequence
  Description of Artificial Sequence: Synthetic peptide
VIYSSGGVTFYADSVKG

SEQ ID NO: 3513 - protein, 15 aa, Artificial Sequence
  Description of Artificial Sequence: Synthetic peptide
DRAYGDYVGWNGFDY

SEQ ID NO: 3514 - protein, 11 aa, Artificial Sequence
  Description of Artificial Sequence: Synthetic peptide
RASQSISSFLA

SEQ ID NO: 3515 - protein, 7 aa, Artificial Sequence
  Description of Artificial Sequence: Synthetic peptide
DASYRAT

SEQ ID NO: 3516 - protein, 9 aa, Artificial Sequence
  Description of Artificial Sequence: Synthetic peptide
QQRGNWPIT

SEQ ID NO: 3517 - protein, 5 aa, Artificial Sequence
  Description of Artificial Sequence: Synthetic peptide
MYDMW

SEQ ID NO: 3518 - protein, 17 aa, Artificial Sequence
  Description of Artificial Sequence: Synthetic peptide
VIYSSGGYTAYADSVKG

SEQ ID NO: 3519 - protein, 15 aa, Artificial Sequence
  Description of Artificial Sequence: Synthetic peptide
DRAYGDYVGWNGFDY

SEQ ID NO: 3520 - protein, 11 aa, Artificial Sequence
  Description of Artificial Sequence: Synthetic peptide
RASQSISSFLA

SEQ ID NO: 3521 - protein, 7 aa, Artificial Sequence
  Description of Artificial Sequence: Synthetic peptide
DASYRAT

SEQ ID NO: 3522 - protein, 9 aa, Artificial Sequence
  Description of Artificial Sequence: Synthetic peptide
QQRGNWPIT

SEQ ID NO: 3523 - protein, 5 aa, Artificial Sequence
  Description of Artificial Sequence: Synthetic peptide
MYDMW

SEQ ID NO: 3524 - protein, 17 aa, Artificial Sequence
  Description of Artificial Sequence: Synthetic peptide
VIYSSGGYTDYADSVKG

SEQ ID NO: 3525 - protein, 15 aa, Artificial Sequence
  Description of Artificial Sequence: Synthetic peptide
DRAYGDYVGWNGFDY

SEQ ID NO: 3526 - protein, 11 aa, Artificial Sequence
  Description of Artificial Sequence: Synthetic peptide
RASQSISSFLA

SEQ ID NO: 3527 - protein, 7 aa, Artificial Sequence
  Description of Artificial Sequence: Synthetic peptide
DASYRAT

SEQ ID NO: 3528 - protein, 9 aa, Artificial Sequence
  Description of Artificial Sequence: Synthetic peptide
QQRGNWPIT

SEQ ID NO: 3529 - protein, 5 aa, Artificial Sequence
  Description of Artificial Sequence: Synthetic peptide
MYDMW

SEQ ID NO: 3530 - protein, 17 aa, Artificial Sequence
  Description of Artificial Sequence: Synthetic peptide
VIYSSGGYTNYADSVKG

SEQ ID NO: 3531 - protein, 15 aa, Artificial Sequence
  Description of Artificial Sequence: Synthetic peptide
DRAYGDYVGWNGFDY

SEQ ID NO: 3532 - protein, 11 aa, Artificial Sequence
  Description of Artificial Sequence: Synthetic peptide
RASQSISSFLA

SEQ ID NO: 3533 - protein, 7 aa, Artificial Sequence
  Description of Artificial Sequence: Synthetic peptide
DASYRAT

SEQ ID NO: 3534 - protein, 9 aa, Artificial Sequence
  Description of Artificial Sequence: Synthetic peptide
QQRGNWPIT

SEQ ID NO: 3535 - protein, 5 aa, Artificial Sequence
  Description of Artificial Sequence: Synthetic peptide
MYDMW

SEQ ID NO: 3536 - protein, 17 aa, Artificial Sequence
  Description of Artificial Sequence: Synthetic peptide
VIYSSGGYTSYADSVKG

SEQ ID NO: 3537 - protein, 15 aa, Artificial Sequence
  Description of Artificial Sequence: Synthetic peptide
DRAYGDYVGWNGFDY

SEQ ID NO: 3538 - protein, 11 aa, Artificial Sequence
  Description of Artificial Sequence: Synthetic peptide
RASQSISSFLA

SEQ ID NO: 3539 - protein, 7 aa, Artificial Sequence
  Description of Artificial Sequence: Synthetic peptide
DASYRAT

SEQ ID NO: 3540 - protein, 9 aa, Artificial Sequence
  Description of Artificial Sequence: Synthetic peptide
QQRGNWPIT

SEQ ID NO: 3541 - protein, 5 aa, Artificial Sequence
  Description of Artificial Sequence: Synthetic peptide
MYDMW

SEQ ID NO: 3542 - protein, 17 aa, Artificial Sequence
  Description of Artificial Sequence: Synthetic peptide
YISSSGGSTLYADSVKG

SEQ ID NO: 3543 - protein, 15 aa, Artificial Sequence
  Description of Artificial Sequence: Synthetic peptide
DRAYGDYVGWNGFDY

SEQ ID NO: 3544 - protein, 11 aa, Artificial Sequence
  Description of Artificial Sequence: Synthetic peptide
RASQSISSFLA

SEQ ID NO: 3545 - protein, 7 aa, Artificial Sequence
  Description of Artificial Sequence: Synthetic peptide
DASYRAT

SEQ ID NO: 3546 - protein, 9 aa, Artificial Sequence
  Description of Artificial Sequence: Synthetic peptide
QQRGNWPIT

SEQ ID NO: 3547 - protein, 5 aa, Artificial Sequence
  Description of Artificial Sequence: Synthetic peptide
MYMMI

SEQ ID NO: 3548 - protein, 17 aa, Artificial Sequence
  Description of Artificial Sequence: Synthetic peptide
SIYPSGGFTSYADSVKG

SEQ ID NO: 3549 - protein, 15 aa, Artificial Sequence
  Description of Artificial Sequence: Synthetic peptide
DRAYGDYVGWNGFDY

SEQ ID NO: 3550 - protein, 11 aa, Artificial Sequence
  Description of Artificial Sequence: Synthetic peptide
RASQSISSFLA

SEQ ID NO: 3551 - protein, 7 aa, Artificial Sequence
  Description of Artificial Sequence: Synthetic peptide
DASYRAT

SEQ ID NO: 3552 - protein, 9 aa, Artificial Sequence
  Description of Artificial Sequence: Synthetic peptide
QQRGNWPIT

SEQ ID NO: 3553 - protein, 5 aa, Artificial Sequence
  Description of Artificial Sequence: Synthetic peptide
MYNMW

SEQ ID NO: 3554 - protein, 17 aa, Artificial Sequence
  Description of Artificial Sequence: Synthetic peptide
SISPSGGATYYADSVKG

SEQ ID NO: 3555 - protein, 15 aa, Artificial Sequence
  Description of Artificial Sequence: Synthetic peptide
DRAYGDYVGWNGFDY

SEQ ID NO: 3556 - protein, 11 aa, Artificial Sequence
  Description of Artificial Sequence: Synthetic peptide
RASQSISSFLA

SEQ ID NO: 3557 - protein, 7 aa, Artificial Sequence
  Description of Artificial Sequence: Synthetic peptide
DASYRAT

SEQ ID NO: 3558 - protein, 9 aa, Artificial Sequence
  Description of Artificial Sequence: Synthetic peptide
QQRGNWPIT

SEQ ID NO: 3559 - protein, 5 aa, Artificial Sequence
  Description of Artificial Sequence: Synthetic peptide
MYPII

SEQ ID NO: 3560 - protein, 17 aa, Artificial Sequence
  Description of Artificial Sequence: Synthetic peptide
YISPSGGFTGYADSVKG

SEQ ID NO: 3561 - protein, 15 aa, Artificial Sequence
  Description of Artificial Sequence: Synthetic peptide
DRAYGDYVGWNGFDY

SEQ ID NO: 3562 - protein, 11 aa, Artificial Sequence
  Description of Artificial Sequence: Synthetic peptide
RASQSISSFLA

SEQ ID NO: 3563 - protein, 7 aa, Artificial Sequence
  Description of Artificial Sequence: Synthetic peptide
DASYRAT

SEQ ID NO: 3564 - protein, 9 aa, Artificial Sequence
  Description of Artificial Sequence: Synthetic peptide
QQRGNWPIT

SEQ ID NO: 3565 - protein, 5 aa, Artificial Sequence
  Description of Artificial Sequence: Synthetic peptide
MYPMF

SEQ ID NO: 3566 - protein, 17 aa, Artificial Sequence
  Description of Artificial Sequence: Synthetic peptide
YISPSGGWTAYADSVKG

SEQ ID NO: 3567 - protein, 15 aa, Artificial Sequence
  Description of Artificial Sequence: Synthetic peptide
DRAYGDYVGWNGFDY

SEQ ID NO: 3568 - protein, 11 aa, Artificial Sequence
  Description of Artificial Sequence: Synthetic peptide
RASQSISSFLA

SEQ ID NO: 3569 - protein, 7 aa, Artificial Sequence
  Description of Artificial Sequence: Synthetic peptide
DASYRAT

SEQ ID NO: 3570 - protein, 9 aa, Artificial Sequence
  Description of Artificial Sequence: Synthetic peptide
QQRGNWPIT

SEQ ID NO: 3571 - protein, 5 aa, Artificial Sequence
  Description of Artificial Sequence: Synthetic peptide
MYPMF

SEQ ID NO: 3572 - protein, 17 aa, Artificial Sequence
  Description of Artificial Sequence: Synthetic peptide
YISPSGGWTDYADSVKG

SEQ ID NO: 3573 - protein, 15 aa, Artificial Sequence
  Description of Artificial Sequence: Synthetic peptide
DRAYGDYVGWNGFDY

SEQ ID NO: 3574 - protein, 11 aa, Artificial Sequence
  Description of Artificial Sequence: Synthetic peptide
RASQSISSFLA

SEQ ID NO: 3575 - protein, 7 aa, Artificial Sequence
  Description of Artificial Sequence: Synthetic peptide
DASYRAT

SEQ ID NO: 3576 - protein, 9 aa, Artificial Sequence
  Description of Artificial Sequence: Synthetic peptide
QQRGNWPIT

SEQ ID NO: 3577 - protein, 5 aa, Artificial Sequence
  Description of Artificial Sequence: Synthetic peptide
MYPMF

SEQ ID NO: 3578 - protein, 17 aa, Artificial Sequence
  Description of Artificial Sequence: Synthetic peptide
YIVPSGGWTDYADSVKG

SEQ ID NO: 3579 - protein, 15 aa, Artificial Sequence
  Description of Artificial Sequence: Synthetic peptide
DRAYGDYVGWNGFDY

SEQ ID NO: 3580 - protein, 11 aa, Artificial Sequence
  Description of Artificial Sequence: Synthetic peptide
RASQSISSFLA

SEQ ID NO: 3581 - protein, 7 aa, Artificial Sequence
  Description of Artificial Sequence: Synthetic peptide
DASYRAT

SEQ ID NO: 3582 - protein, 9 aa, Artificial Sequence
  Description of Artificial Sequence: Synthetic peptide
QQRGNWPIT

SEQ ID NO: 3583 - protein, 5 aa, Artificial Sequence
  Description of Artificial Sequence: Synthetic peptide
MYPMI

SEQ ID NO: 3584 - protein, 17 aa, Artificial Sequence
  Description of Artificial Sequence: Synthetic peptide
YISPSGGGTFYADSVKG

SEQ ID NO: 3585 - protein, 15 aa, Artificial Sequence
  Description of Artificial Sequence: Synthetic peptide
DRAYGDYVGWNGFDY

SEQ ID NO: 3586 - protein, 11 aa, Artificial Sequence
  Description of Artificial Sequence: Synthetic peptide
RASQSISSFLA

SEQ ID NO: 3587 - protein, 7 aa, Artificial Sequence
  Description of Artificial Sequence: Synthetic peptide
DASYRAT

SEQ ID NO: 3588 - protein, 9 aa, Artificial Sequence
  Description of Artificial Sequence: Synthetic peptide
QQRGNWPIT

SEQ ID NO: 3589 - protein, 5 aa, Artificial Sequence
  Description of Artificial Sequence: Synthetic peptide
MYPMI

SEQ ID NO: 3590 - protein, 17 aa, Artificial Sequence
  Description of Artificial Sequence: Synthetic peptide
YIVPSGGFTGYADSVKG

SEQ ID NO: 3591 - protein, 15 aa, Artificial Sequence
  Description of Artificial Sequence: Synthetic peptide
DRAYGDYVGWNGFDY

SEQ ID NO: 3592 - protein, 11 aa, Artificial Sequence
  Description of Artificial Sequence: Synthetic peptide
RASQSISSFLA

SEQ ID NO: 3593 - protein, 7 aa, Artificial Sequence
  Description of Artificial Sequence: Synthetic peptide
DASYRAT

SEQ ID NO: 3594 - protein, 9 aa, Artificial Sequence
  Description of Artificial Sequence: Synthetic peptide
QQRGNWPIT

SEQ ID NO: 3595 - protein, 5 aa, Artificial Sequence
  Description of Artificial Sequence: Synthetic peptide
MYPML

SEQ ID NO: 3596 - protein, 17 aa, Artificial Sequence
  Description of Artificial Sequence: Synthetic peptide
YISPSGGYTGYADSVKG

SEQ ID NO: 3597 - protein, 15 aa, Artificial Sequence
  Description of Artificial Sequence: Synthetic peptide
DRAYGDYVGWNGFDY

SEQ ID NO: 3598 - protein, 11 aa, Artificial Sequence
  Description of Artificial Sequence: Synthetic peptide
RASQSISSFLA

SEQ ID NO: 3599 - protein, 7 aa, Artificial Sequence
  Description of Artificial Sequence: Synthetic peptide
DASYRAT

SEQ ID NO: 3600 - protein, 9 aa, Artificial Sequence
  Description of Artificial Sequence: Synthetic peptide
QQRGNWPIT

SEQ ID NO: 3601 - protein, 5 aa, Artificial Sequence
  Description of Artificial Sequence: Synthetic peptide
MYPMT

SEQ ID NO: 3602 - protein, 17 aa, Artificial Sequence
  Description of Artificial Sequence: Synthetic peptide
YISPSGGYTGYADSVKG

SEQ ID NO: 3603 - protein, 15 aa, Artificial Sequence
  Description of Artificial Sequence: Synthetic peptide
DRAYGDYVGWNGFDY

SEQ ID NO: 3604 - protein, 11 aa, Artificial Sequence
  Description of Artificial Sequence: Synthetic peptide
RASQSISSFLA

SEQ ID NO: 3605 - protein, 7 aa, Artificial Sequence
  Description of Artificial Sequence: Synthetic peptide
DASYRAT

SEQ ID NO: 3606 - protein, 9 aa, Artificial Sequence
  Description of Artificial Sequence: Synthetic peptide
QQRGNWPIT

SEQ ID NO: 3607 - protein, 5 aa, Artificial Sequence
  Description of Artificial Sequence: Synthetic peptide
MYSMW

SEQ ID NO: 3608 - protein, 17 aa, Artificial Sequence
  Description of Artificial Sequence: Synthetic peptide
VIYPSGGFTDYADSVKG

SEQ ID NO: 3609 - protein, 15 aa, Artificial Sequence
  Description of Artificial Sequence: Synthetic peptide
DRAYGDYVGWNGFDY

SEQ ID NO: 3610 - protein, 11 aa, Artificial Sequence
  Description of Artificial Sequence: Synthetic peptide
RASQSISSFLA

SEQ ID NO: 3611 - protein, 7 aa, Artificial Sequence
  Description of Artificial Sequence: Synthetic peptide
DASYRAT

SEQ ID NO: 3612 - protein, 9 aa, Artificial Sequence
  Description of Artificial Sequence: Synthetic peptide
QQRGNWPIT

SEQ ID NO: 3613 - protein, 5 aa, Artificial Sequence
  Description of Artificial Sequence: Synthetic peptide
MYWML

SEQ ID NO: 3614 - protein, 17 aa, Artificial Sequence
  Description of Artificial Sequence: Synthetic peptide
YISPSGGGTFYADSVKG

SEQ ID NO: 3615 - protein, 15 aa, Artificial Sequence
  Description of Artificial Sequence: Synthetic peptide
DRAYGDYVGWNGFDY

SEQ ID NO: 3616 - protein, 11 aa, Artificial Sequence
  Description of Artificial Sequence: Synthetic peptide
RASQSISSFLA

SEQ ID NO: 3617 - protein, 7 aa, Artificial Sequence
  Description of Artificial Sequence: Synthetic peptide
DASYRAT

SEQ ID NO: 3618 - protein, 9 aa, Artificial Sequence
  Description of Artificial Sequence: Synthetic peptide
QQRGNWPIT

SEQ ID NO: 3619 - protein, 5 aa, Artificial Sequence
  Description of Artificial Sequence: Synthetic peptide
MYWMW

SEQ ID NO: 3620 - protein, 17 aa, Artificial Sequence
  Description of Artificial Sequence: Synthetic peptide
SISSSGGYTGYADSVKG

SEQ ID NO: 3621 - protein, 15 aa, Artificial Sequence
  Description of Artificial Sequence: Synthetic peptide
DRAYGDYVGWNGFDY

SEQ ID NO: 3622 - protein, 11 aa, Artificial Sequence
  Description of Artificial Sequence: Synthetic peptide
RASQSISSFLA

SEQ ID NO: 3623 - protein, 7 aa, Artificial Sequence
  Description of Artificial Sequence: Synthetic peptide
DASYRAT

SEQ ID NO: 3624 - protein, 9 aa, Artificial Sequence
  Description of Artificial Sequence: Synthetic peptide
QQRGNWPIT

SEQ ID NO: 3625 - protein, 5 aa, Artificial Sequence
  Description of Artificial Sequence: Synthetic peptide
NYAMW

SEQ ID NO: 3626 - protein, 16 aa, Artificial Sequence
  Description of Artificial Sequence: Synthetic peptide
YISPSGATYYADSVKG

SEQ ID NO: 3627 - protein, 15 aa, Artificial Sequence
  Description of Artificial Sequence: Synthetic peptide
DRAYGDYVGWNGFDY

SEQ ID NO: 3628 - protein, 11 aa, Artificial Sequence
  Description of Artificial Sequence: Synthetic peptide
RASQSISSFLA

SEQ ID NO: 3629 - protein, 7 aa, Artificial Sequence
  Description of Artificial Sequence: Synthetic peptide
DASYRAT

SEQ ID NO: 3630 - protein, 9 aa, Artificial Sequence
  Description of Artificial Sequence: Synthetic peptide
QQRGNWPIT

SEQ ID NO: 3631 - protein, 5 aa, Artificial Sequence
  Description of Artificial Sequence: Synthetic peptide
NYAMW

SEQ ID NO: 3632 - protein, 17 aa, Artificial Sequence
  Description of Artificial Sequence: Synthetic peptide
YISPSGGSTYYADSVKG

SEQ ID NO: 3633 - protein, 15 aa, Artificial Sequence
  Description of Artificial Sequence: Synthetic peptide
DRAYGDYVGWNGFDY

SEQ ID NO: 3634 - protein, 11 aa, Artificial Sequence
  Description of Artificial Sequence: Synthetic peptide
RASQSISSFLA

SEQ ID NO: 3635 - protein, 7 aa, Artificial Sequence
  Description of Artificial Sequence: Synthetic peptide
DASYRAT

SEQ ID NO: 3636 - protein, 9 aa, Artificial Sequence
  Description of Artificial Sequence: Synthetic peptide
QQRGNWPIT

SEQ ID NO: 3637 - protein, 5 aa, Artificial Sequence
  Description of Artificial Sequence: Synthetic peptide
NYDMA

SEQ ID NO: 3638 - protein, 17 aa, Artificial Sequence
  Description of Artificial Sequence: Synthetic peptide
WISSSGGFTDYADSVKG

SEQ ID NO: 3639 - protein, 15 aa, Artificial Sequence
  Description of Artificial Sequence: Synthetic peptide
DRAYGDYVGWNGFDY

SEQ ID NO: 3640 - protein, 11 aa, Artificial Sequence
  Description of Artificial Sequence: Synthetic peptide
RASQSISSFLA

SEQ ID NO: 3641 - protein, 7 aa, Artificial Sequence
  Description of Artificial Sequence: Synthetic peptide
DASYRAT

SEQ ID NO: 3642 - protein, 9 aa, Artificial Sequence
  Description of Artificial Sequence: Synthetic peptide
QQRGNWPIT

SEQ ID NO: 3643 - protein, 5 aa, Artificial Sequence
  Description of Artificial Sequence: Synthetic peptide
NYDMI

SEQ ID NO: 3644 - protein, 17 aa, Artificial Sequence
  Description of Artificial Sequence: Synthetic peptide
VISPSGGWTSYADSVKG

SEQ ID NO: 3645 - protein, 15 aa, Artificial Sequence
  Description of Artificial Sequence: Synthetic peptide
DRAYGDYVGWNGFDY

SEQ ID NO: 3646 - protein, 11 aa, Artificial Sequence
  Description of Artificial Sequence: Synthetic peptide
RASQSISSFLA

SEQ ID NO: 3647 - protein, 7 aa, Artificial Sequence
  Description of Artificial Sequence: Synthetic peptide
DASYRAT

SEQ ID NO: 3648 - protein, 9 aa, Artificial Sequence
  Description of Artificial Sequence: Synthetic peptide
QQRGNWPIT

SEQ ID NO: 3649 - protein, 5 aa, Artificial Sequence
  Description of Artificial Sequence: Synthetic peptide
NYDMI

SEQ ID NO: 3650 - protein, 17 aa, Artificial Sequence
  Description of Artificial Sequence: Synthetic peptide
YIVPSGGYTAYADSVKG

SEQ ID NO: 3651 - protein, 15 aa, Artificial Sequence
  Description of Artificial Sequence: Synthetic peptide
DRAYGDYVGWNGFDY

SEQ ID NO: 3652 - protein, 11 aa, Artificial Sequence
  Description of Artificial Sequence: Synthetic peptide
RASQSISSFLA

SEQ ID NO: 3653 - protein, 7 aa, Artificial Sequence
  Description of Artificial Sequence: Synthetic peptide
DASYRAT

SEQ ID NO: 3654 - protein, 9 aa, Artificial Sequence
  Description of Artificial Sequence: Synthetic peptide
QQRGNWPIT

SEQ ID NO: 3655 - protein, 5 aa, Artificial Sequence
  Description of Artificial Sequence: Synthetic peptide
NYDMW

SEQ ID NO: 3656 - protein, 17 aa, Artificial Sequence
  Description of Artificial Sequence: Synthetic peptide
VISPSGGFTGYADSVKG

SEQ ID NO: 3657 - protein, 15 aa, Artificial Sequence
  Description of Artificial Sequence: Synthetic peptide
DRAYGDYVGWNGFDY

SEQ ID NO: 3658 - protein, 11 aa, Artificial Sequence
  Description of Artificial Sequence: Synthetic peptide
RASQSISSFLA

SEQ ID NO: 3659 - protein, 7 aa, Artificial Sequence
  Description of Artificial Sequence: Synthetic peptide
DASYRAT

SEQ ID NO: 3660 - protein, 9 aa, Artificial Sequence
  Description of Artificial Sequence: Synthetic peptide
QQRGNWPIT

SEQ ID NO: 3661 - protein, 5 aa, Artificial Sequence
  Description of Artificial Sequence: Synthetic peptide
NYDMW

SEQ ID NO: 3662 - protein, 17 aa, Artificial Sequence
  Description of Artificial Sequence: Synthetic peptide
VISSSGGYTGYADSVKG

SEQ ID NO: 3663 - protein, 15 aa, Artificial Sequence
  Description of Artificial Sequence: Synthetic peptide
DRAYGDYVGWNGFDY

SEQ ID NO: 3664 - protein, 11 aa, Artificial Sequence
  Description of Artificial Sequence: Synthetic peptide
RASQSISSFLA

SEQ ID NO: 3665 - protein, 7 aa, Artificial Sequence
  Description of Artificial Sequence: Synthetic peptide
DASYRAT

SEQ ID NO: 3666 - protein, 9 aa, Artificial Sequence
  Description of Artificial Sequence: Synthetic peptide
QQRGNWPIT

SEQ ID NO: 3667 - protein, 5 aa, Artificial Sequence
  Description of Artificial Sequence: Synthetic peptide
NYDMW

SEQ ID NO: 3668 - protein, 16 aa, Artificial Sequence
  Description of Artificial Sequence: Synthetic peptide
VISSSGMTYYADSVKG

SEQ ID NO: 3669 - protein, 15 aa, Artificial Sequence
  Description of Artificial Sequence: Synthetic peptide
DRAYGDYVGWNGFDY

SEQ ID NO: 3670 - protein, 11 aa, Artificial Sequence
  Description of Artificial Sequence: Synthetic peptide
RASQSISSFLA

SEQ ID NO: 3671 - protein, 7 aa, Artificial Sequence
  Description of Artificial Sequence: Synthetic peptide
DASYRAT

SEQ ID NO: 3672 - protein, 9 aa, Artificial Sequence
  Description of Artificial Sequence: Synthetic peptide
QQRGNWPIT

SEQ ID NO: 3673 - protein, 5 aa, Artificial Sequence
  Description of Artificial Sequence: Synthetic peptide
NYDMW

SEQ ID NO: 3674 - protein, 17 aa, Artificial Sequence
  Description of Artificial Sequence: Synthetic peptide
VIVPSGGATYYADSVKG

SEQ ID NO: 3675 - protein, 15 aa, Artificial Sequence
  Description of Artificial Sequence: Synthetic peptide
DRAYGDYVGWNGFDY

SEQ ID NO: 3676 - protein, 11 aa, Artificial Sequence
  Description of Artificial Sequence: Synthetic peptide
RASQSISSFLA

SEQ ID NO: 3677 - protein, 7 aa, Artificial Sequence
  Description of Artificial Sequence: Synthetic peptide
DASYRAT

SEQ ID NO: 3678 - protein, 9 aa, Artificial Sequence
  Description of Artificial Sequence: Synthetic peptide
QQRGNWPIT

SEQ ID NO: 3679 - protein, 5 aa, Artificial Sequence
  Description of Artificial Sequence: Synthetic peptide
NYDMW

SEQ ID NO: 3680 - protein, 17 aa, Artificial Sequence
  Description of Artificial Sequence: Synthetic peptide
VIYPSGGATFYADSVKG

SEQ ID NO: 3681 - protein, 15 aa, Artificial Sequence
  Description of Artificial Sequence: Synthetic peptide
DRAYGDYVGWNGFDY

SEQ ID NO: 3682 - protein, 11 aa, Artificial Sequence
  Description of Artificial Sequence: Synthetic peptide
RASQSISSFLA

SEQ ID NO: 3683 - protein, 7 aa, Artificial Sequence
  Description of Artificial Sequence: Synthetic peptide
DASYRAT

SEQ ID NO: 3684 - protein, 9 aa, Artificial Sequence
  Description of Artificial Sequence: Synthetic peptide
QQRGNWPIT

SEQ ID NO: 3685 - protein, 5 aa, Artificial Sequence
  Description of Artificial Sequence: Synthetic peptide
NYDMW

SEQ ID NO: 3686 - protein, 17 aa, Artificial Sequence
  Description of Artificial Sequence: Synthetic peptide
VIYPSGGITYYADSVKG

SEQ ID NO: 3687 - protein, 15 aa, Artificial Sequence
  Description of Artificial Sequence: Synthetic peptide
DRAYGDYVGWNGFDY

SEQ ID NO: 3688 - protein, 11 aa, Artificial Sequence
  Description of Artificial Sequence: Synthetic peptide
RASQSISSFLA

SEQ ID NO: 3689 - protein, 7 aa, Artificial Sequence
  Description of Artificial Sequence: Synthetic peptide
DASYRAT

SEQ ID NO: 3690 - protein, 9 aa, Artificial Sequence
  Description of Artificial Sequence: Synthetic peptide
QQRGNWPIT

SEQ ID NO: 3691 - protein, 5 aa, Artificial Sequence
  Description of Artificial Sequence: Synthetic peptide
NYDMW

SEQ ID NO: 3692 - protein, 17 aa, Artificial Sequence
  Description of Artificial Sequence: Synthetic peptide
VIYPSGGPTYYADSVKG

SEQ ID NO: 3693 - protein, 15 aa, Artificial Sequence
  Description of Artificial Sequence: Synthetic peptide
DRAYGDYVGWNGFDY

SEQ ID NO: 3694 - protein, 11 aa, Artificial Sequence
  Description of Artificial Sequence: Synthetic peptide
RASQSISSFLA

SEQ ID NO: 3695 - protein, 7 aa, Artificial Sequence
  Description of Artificial Sequence: Synthetic peptide
DASYRAT

SEQ ID NO: 3696 - protein, 9 aa, Artificial Sequence
  Description of Artificial Sequence: Synthetic peptide
QQRGNWPIT

SEQ ID NO: 3697 - protein, 5 aa, Artificial Sequence
  Description of Artificial Sequence: Synthetic peptide
NYDMW

SEQ ID NO: 3698 - protein, 17 aa, Artificial Sequence
  Description of Artificial Sequence: Synthetic peptide
VIYPSGGYTVYADSVKG

SEQ ID NO: 3699 - protein, 15 aa, Artificial Sequence
  Description of Artificial Sequence: Synthetic peptide
DRAYGDYVGWNGFDY

SEQ ID NO: 3700 - protein, 11 aa, Artificial Sequence
  Description of Artificial Sequence: Synthetic peptide
RASQSISSFLA

SEQ ID NO: 3701 - protein, 7 aa, Artificial Sequence
  Description of Artificial Sequence: Synthetic peptide
DASYRAT

SEQ ID NO: 3702 - protein, 9 aa, Artificial Sequence
  Description of Artificial Sequence: Synthetic peptide
QQRGNWPIT

SEQ ID NO: 3703 - protein, 5 aa, Artificial Sequence
  Description of Artificial Sequence: Synthetic peptide
NYDMW

SEQ ID NO: 3704 - protein, 17 aa, Artificial Sequence
  Description of Artificial Sequence: Synthetic peptide
VIYSSGGPTYYADSVKG

SEQ ID NO: 3705 - protein, 15 aa, Artificial Sequence
  Description of Artificial Sequence: Synthetic peptide
DRAYGDYVGWNGFDY

SEQ ID NO: 3706 - protein, 11 aa, Artificial Sequence
  Description of Artificial Sequence: Synthetic peptide
RASQSISSFLA

SEQ ID NO: 3707 - protein, 7 aa, Artificial Sequence
  Description of Artificial Sequence: Synthetic peptide
DASYRAT

SEQ ID NO: 3708 - protein, 9 aa, Artificial Sequence
  Description of Artificial Sequence: Synthetic peptide
QQRGNWPIT

SEQ ID NO: 3709 - protein, 5 aa, Artificial Sequence
  Description of Artificial Sequence: Synthetic peptide
NYDMW

SEQ ID NO: 3710 - protein, 17 aa, Artificial Sequence
  Description of Artificial Sequence: Synthetic peptide
VIYSSGGYTAYADSVKG

SEQ ID NO: 3711 - protein, 15 aa, Artificial Sequence
  Description of Artificial Sequence: Synthetic peptide
DRAYGDYVGWNGFDY

SEQ ID NO: 3712 - protein, 11 aa, Artificial Sequence
  Description of Artificial Sequence: Synthetic peptide
RASQSISSFLA

SEQ ID NO: 3713 - protein, 7 aa, Artificial Sequence
  Description of Artificial Sequence: Synthetic peptide
DASYRAT

SEQ ID NO: 3714 - protein, 9 aa, Artificial Sequence
  Description of Artificial Sequence: Synthetic peptide
QQRGNWPIT

SEQ ID NO: 3715 - protein, 5 aa, Artificial Sequence
  Description of Artificial Sequence: Synthetic peptide
NYDMW

SEQ ID NO: 3716 - protein, 17 aa, Artificial Sequence
  Description of Artificial Sequence: Synthetic peptide
WISSSGGATIYADSVKG

SEQ ID NO: 3717 - protein, 15 aa, Artificial Sequence
  Description of Artificial Sequence: Synthetic peptide
DRAYGDYVGWNGFDY

SEQ ID NO: 3718 - protein, 11 aa, Artificial Sequence
  Description of Artificial Sequence: Synthetic peptide
RASQSISSFLA

SEQ ID NO: 3719 - protein, 7 aa, Artificial Sequence
  Description of Artificial Sequence: Synthetic peptide
DASYRAT

SEQ ID NO: 3720 - protein, 9 aa, Artificial Sequence
  Description of Artificial Sequence: Synthetic peptide
QQRGNWPIT

SEQ ID NO: 3721 - protein, 5 aa, Artificial Sequence
  Description of Artificial Sequence: Synthetic peptide
NYDMW

SEQ ID NO: 3722 - protein, 17 aa, Artificial Sequence
  Description of Artificial Sequence: Synthetic peptide
YISSSGGATLYADSVKG

SEQ ID NO: 3723 - protein, 15 aa, Artificial Sequence
  Description of Artificial Sequence: Synthetic peptide
DRAYGDYVGWNGFDY

SEQ ID NO: 3724 - protein, 11 aa, Artificial Sequence
  Description of Artificial Sequence: Synthetic peptide
RASQSISSFLA

SEQ ID NO: 3725 - protein, 7 aa, Artificial Sequence
  Description of Artificial Sequence: Synthetic peptide
DASYRAT

SEQ ID NO: 3726 - protein, 9 aa, Artificial Sequence
  Description of Artificial Sequence: Synthetic peptide
QQRGNWPIT

SEQ ID NO: 3727 - protein, 5 aa, Artificial Sequence
  Description of Artificial Sequence: Synthetic peptide
NYEMW

SEQ ID NO: 3728 - protein, 17 aa, Artificial Sequence
  Description of Artificial Sequence: Synthetic peptide
VIYSSGSATFYADSVKG

SEQ ID NO: 3729 - protein, 15 aa, Artificial Sequence
  Description of Artificial Sequence: Synthetic peptide
DRAYGDYVGWNGFDY

SEQ ID NO: 3730 - protein, 11 aa, Artificial Sequence
  Description of Artificial Sequence: Synthetic peptide
RASQSISSFLA

SEQ ID NO: 3731 - protein, 7 aa, Artificial Sequence
  Description of Artificial Sequence: Synthetic peptide
DASYRAT

SEQ ID NO: 3732 - protein, 9 aa, Artificial Sequence
  Description of Artificial Sequence: Synthetic peptide
QQRGNWPIT

SEQ ID NO: 3733 - protein, 5 aa, Artificial Sequence
  Description of Artificial Sequence: Synthetic peptide
NYIMW

SEQ ID NO: 3734 - protein, 17 aa, Artificial Sequence
  Description of Artificial Sequence: Synthetic peptide
SIYPSGGATLYADSVKG

SEQ ID NO: 3735 - protein, 15 aa, Artificial Sequence
  Description of Artificial Sequence: Synthetic peptide
DRAYGDYVGWNGFDY

SEQ ID NO: 3736 - protein, 11 aa, Artificial Sequence
  Description of Artificial Sequence: Synthetic peptide
RASQSISSFLA

SEQ ID NO: 3737 - protein, 7 aa, Artificial Sequence
  Description of Artificial Sequence: Synthetic peptide
DASYRAT

SEQ ID NO: 3738 - protein, 9 aa, Artificial Sequence
  Description of Artificial Sequence: Synthetic peptide
QQRGNWPIT

SEQ ID NO: 3739 - protein, 5 aa, Artificial Sequence
  Description of Artificial Sequence: Synthetic peptide
NYMMI

SEQ ID NO: 3740 - protein, 17 aa, Artificial Sequence
  Description of Artificial Sequence: Synthetic peptide
SIYPSGGYTGYADSVKG

SEQ ID NO: 3741 - protein, 15 aa, Artificial Sequence
  Description of Artificial Sequence: Synthetic peptide
DRAYGDYVGWNGFDY

SEQ ID NO: 3742 - protein, 11 aa, Artificial Sequence
  Description of Artificial Sequence: Synthetic peptide
RASQSISSFLA

SEQ ID NO: 3743 - protein, 7 aa, Artificial Sequence
  Description of Artificial Sequence: Synthetic peptide
DASYRAT

SEQ ID NO: 3744 - protein, 9 aa, Artificial Sequence
  Description of Artificial Sequence: Synthetic peptide
QQRGNWPIT

SEQ ID NO: 3745 - protein, 5 aa, Artificial Sequence
  Description of Artificial Sequence: Synthetic peptide
NYMMI

SEQ ID NO: 3746 - protein, 17 aa, Artificial Sequence
  Description of Artificial Sequence: Synthetic peptide
SIYSSGGFTSYADSVKG

SEQ ID NO: 3747 - protein, 15 aa, Artificial Sequence
  Description of Artificial Sequence: Synthetic peptide
DRAYGDYVGWNGFDY

SEQ ID NO: 3748 - protein, 11 aa, Artificial Sequence
  Description of Artificial Sequence: Synthetic peptide
RASQSISSFLA

SEQ ID NO: 3749 - protein, 7 aa, Artificial Sequence
  Description of Artificial Sequence: Synthetic peptide
DASYRAT

SEQ ID NO: 3750 - protein, 9 aa, Artificial Sequence
  Description of Artificial Sequence: Synthetic peptide
QQRGNWPIT

SEQ ID NO: 3751 - protein, 5 aa, Artificial Sequence
  Description of Artificial Sequence: Synthetic peptide
NYMMW

SEQ ID NO: 3752 - protein, 17 aa, Artificial Sequence
  Description of Artificial Sequence: Synthetic peptide
SIGPSGGGTFYADSVKG

SEQ ID NO: 3753 - protein, 15 aa, Artificial Sequence
  Description of Artificial Sequence: Synthetic peptide
DRAYGDYVGWNGFDY

SEQ ID NO: 3754 - protein, 11 aa, Artificial Sequence
  Description of Artificial Sequence: Synthetic peptide
RASQSISSFLA

SEQ ID NO: 3755 - protein, 7 aa, Artificial Sequence
  Description of Artificial Sequence: Synthetic peptide
DASYRAT

SEQ ID NO: 3756 - protein, 9 aa, Artificial Sequence
  Description of Artificial Sequence: Synthetic peptide
QQRGNWPIT

SEQ ID NO: 3757 - protein, 5 aa, Artificial Sequence
  Description of Artificial Sequence: Synthetic peptide
NYMMW

SEQ ID NO: 3758 - protein, 17 aa, Artificial Sequence
  Description of Artificial Sequence: Synthetic peptide
SIYSSGGGTFYADSVKG

SEQ ID NO: 3759 - protein, 15 aa, Artificial Sequence
  Description of Artificial Sequence: Synthetic peptide
DRAYGDYVGWNGFDY

SEQ ID NO: 3760 - protein, 11 aa, Artificial Sequence
  Description of Artificial Sequence: Synthetic peptide
RASQSISSFLA

SEQ ID NO: 3761 - protein, 7 aa, Artificial Sequence
  Description of Artificial Sequence: Synthetic peptide
DASYRAT

SEQ ID NO: 3762 - protein, 9 aa, Artificial Sequence
  Description of Artificial Sequence: Synthetic peptide
QQRGNWPIT

SEQ ID NO: 3763 - protein, 5 aa, Artificial Sequence
  Description of Artificial Sequence: Synthetic peptide
NYMMW

SEQ ID NO: 3764 - protein, 17 aa, Artificial Sequence
  Description of Artificial Sequence: Synthetic peptide
VISPSGGATYYADSVKG

SEQ ID NO: 3765 - protein, 15 aa, Artificial Sequence
  Description of Artificial Sequence: Synthetic peptide
DRAYGDYVGWNGFDY

SEQ ID NO: 3766 - protein, 11 aa, Artificial Sequence
  Description of Artificial Sequence: Synthetic peptide
RASQSISSFLA

SEQ ID NO: 3767 - protein, 7 aa, Artificial Sequence
  Description of Artificial Sequence: Synthetic peptide
DASYRAT

SEQ ID NO: 3768 - protein, 9 aa, Artificial Sequence
  Description of Artificial Sequence: Synthetic peptide
QQRGNWPIT

SEQ ID NO: 3769 - protein, 5 aa, Artificial Sequence
  Description of Artificial Sequence: Synthetic peptide
NYNMM

SEQ ID NO: 3770 - protein, 17 aa, Artificial Sequence
  Description of Artificial Sequence: Synthetic peptide
YISSSGGYTGYADSVKG

SEQ ID NO: 3771 - protein, 15 aa, Artificial Sequence
  Description of Artificial Sequence: Synthetic peptide
DRAYGDYVGWNGFDY

SEQ ID NO: 3772 - protein, 11 aa, Artificial Sequence
  Description of Artificial Sequence: Synthetic peptide
RASQSISSFLA

SEQ ID NO: 3773 - protein, 7 aa, Artificial Sequence
  Description of Artificial Sequence: Synthetic peptide
DASYRAT

SEQ ID NO: 3774 - protein, 9 aa, Artificial Sequence
  Description of Artificial Sequence: Synthetic peptide
QQRGNWPIT

SEQ ID NO: 3775 - protein, 5 aa, Artificial Sequence
  Description of Artificial Sequence: Synthetic peptide
NYNMW

SEQ ID NO: 3776 - protein, 17 aa, Artificial Sequence
  Description of Artificial Sequence: Synthetic peptide
VIYPSGGPTFYADSVKG

SEQ ID NO: 3777 - protein, 15 aa, Artificial Sequence
  Description of Artificial Sequence: Synthetic peptide
DRAYGDYVGWNGFDY

SEQ ID NO: 3778 - protein, 11 aa, Artificial Sequence
  Description of Artificial Sequence: Synthetic peptide
RASQSISSFLA

SEQ ID NO: 3779 - protein, 7 aa, Artificial Sequence
  Description of Artificial Sequence: Synthetic peptide
DASYRAT

SEQ ID NO: 3780 - protein, 9 aa, Artificial Sequence
  Description of Artificial Sequence: Synthetic peptide
QQRGNWPIT

SEQ ID NO: 3781 - protein, 5 aa, Artificial Sequence
  Description of Artificial Sequence: Synthetic peptide
NYNMW

SEQ ID NO: 3782 - protein, 17 aa, Artificial Sequence
  Description of Artificial Sequence: Synthetic peptide
YISPSGGGTLYADSVKG

SEQ ID NO: 3783 - protein, 15 aa, Artificial Sequence
  Description of Artificial Sequence: Synthetic peptide
DRAYGDYVGWNGFDY

SEQ ID NO: 3784 - protein, 11 aa, Artificial Sequence
  Description of Artificial Sequence: Synthetic peptide
RASQSISSFLA

SEQ ID NO: 3785 - protein, 7 aa, Artificial Sequence
  Description of Artificial Sequence: Synthetic peptide
DASYRAT

SEQ ID NO: 3786 - protein, 9 aa, Artificial Sequence
  Description of Artificial Sequence: Synthetic peptide
QQRGNWPIT

SEQ ID NO: 3787 - protein, 5 aa, Artificial Sequence
  Description of Artificial Sequence: Synthetic peptide
NYPMF

SEQ ID NO: 3788 - protein, 17 aa, Artificial Sequence
  Description of Artificial Sequence: Synthetic peptide
YISPSGGWTSYADSVKG

SEQ ID NO: 3789 - protein, 15 aa, Artificial Sequence
  Description of Artificial Sequence: Synthetic peptide
DRAYGDYVGWNGFDY

SEQ ID NO: 3790 - protein, 11 aa, Artificial Sequence
  Description of Artificial Sequence: Synthetic peptide
RASQSISSFLA

SEQ ID NO: 3791 - protein, 7 aa, Artificial Sequence
  Description of Artificial Sequence: Synthetic peptide
DASYRAT

SEQ ID NO: 3792 - protein, 9 aa, Artificial Sequence
  Description of Artificial Sequence: Synthetic peptide
QQRGNWPIT

SEQ ID NO: 3793 - protein, 5 aa, Artificial Sequence
  Description of Artificial Sequence: Synthetic peptide
NYPMI

SEQ ID NO: 3794 - protein, 17 aa, Artificial Sequence
  Description of Artificial Sequence: Synthetic peptide
YISPSGGGTFYADSVKG

SEQ ID NO: 3795 - protein, 15 aa, Artificial Sequence
  Description of Artificial Sequence: Synthetic peptide
DRAYGDYVGWNGFDY

SEQ ID NO: 3796 - protein, 11 aa, Artificial Sequence
  Description of Artificial Sequence: Synthetic peptide
RASQSISSFLA

SEQ ID NO: 3797 - protein, 7 aa, Artificial Sequence
  Description of Artificial Sequence: Synthetic peptide
DASYRAT

SEQ ID NO: 3798 - protein, 9 aa, Artificial Sequence
  Description of Artificial Sequence: Synthetic peptide
QQRGNWPIT

SEQ ID NO: 3799 - protein, 5 aa, Artificial Sequence
  Description of Artificial Sequence: Synthetic peptide
NYPMI

SEQ ID NO: 3800 - protein, 17 aa, Artificial Sequence
  Description of Artificial Sequence: Synthetic peptide
YISSSGGYTGYADSVKG

SEQ ID NO: 3801 - protein, 15 aa, Artificial Sequence
  Description of Artificial Sequence: Synthetic peptide
DRAYGDYVGWNGFDY

SEQ ID NO: 3802 - protein, 11 aa, Artificial Sequence
  Description of Artificial Sequence: Synthetic peptide
RASQSISSFLA

SEQ ID NO: 3803 - protein, 7 aa, Artificial Sequence
  Description of Artificial Sequence: Synthetic peptide
DASYRAT

SEQ ID NO: 3804 - protein, 9 aa, Artificial Sequence
  Description of Artificial Sequence: Synthetic peptide
QQRGNWPIT

SEQ ID NO: 3805 - protein, 5 aa, Artificial Sequence
  Description of Artificial Sequence: Synthetic peptide
NYPMI

SEQ ID NO: 3806 - protein, 17 aa, Artificial Sequence
  Description of Artificial Sequence: Synthetic peptide
YIVPSGGFTSYADSVKG

SEQ ID NO: 3807 - protein, 15 aa, Artificial Sequence
  Description of Artificial Sequence: Synthetic peptide
DRAYGDYVGWNGFDY

SEQ ID NO: 3808 - protein, 11 aa, Artificial Sequence
  Description of Artificial Sequence: Synthetic peptide
RASQSISSFLA

SEQ ID NO: 3809 - protein, 7 aa, Artificial Sequence
  Description of Artificial Sequence: Synthetic peptide
DASYRAT

SEQ ID NO: 3810 - protein, 9 aa, Artificial Sequence
  Description of Artificial Sequence: Synthetic peptide
QQRGNWPIT

SEQ ID NO: 3811 - protein, 5 aa, Artificial Sequence
  Description of Artificial Sequence: Synthetic peptide
NYPMI

SEQ ID NO: 3812 - protein, 17 aa, Artificial Sequence
  Description of Artificial Sequence: Synthetic peptide
YIYPSGGGTYYADSVKG

SEQ ID NO: 3813 - protein, 15 aa, Artificial Sequence
  Description of Artificial Sequence: Synthetic peptide
DRAYGDYVGWNGFDY

SEQ ID NO: 3814 - protein, 11 aa, Artificial Sequence
  Description of Artificial Sequence: Synthetic peptide
RASQSISSFLA

SEQ ID NO: 3815 - protein, 7 aa, Artificial Sequence
  Description of Artificial Sequence: Synthetic peptide
DASYRAT

SEQ ID NO: 3816 - protein, 9 aa, Artificial Sequence
  Description of Artificial Sequence: Synthetic peptide
QQRGNWPIT

SEQ ID NO: 3817 - protein, 5 aa, Artificial Sequence
  Description of Artificial Sequence: Synthetic peptide
NYPMI

SEQ ID NO: 3818 - protein, 16 aa, Artificial Sequence
  Description of Artificial Sequence: Synthetic peptide
YIYPSGGTFYADSVKG

SEQ ID NO: 3819 - protein, 15 aa, Artificial Sequence
  Description of Artificial Sequence: Synthetic peptide
DRAYGDYVGWNGFDY

SEQ ID NO: 3820 - protein, 11 aa, Artificial Sequence
  Description of Artificial Sequence: Synthetic peptide
RASQSISSFLA

SEQ ID NO: 3821 - protein, 7 aa, Artificial Sequence
  Description of Artificial Sequence: Synthetic peptide
DASYRAT

SEQ ID NO: 3822 - protein, 9 aa, Artificial Sequence
  Description of Artificial Sequence: Synthetic peptide
QQRGNWPIT

SEQ ID NO: 3823 - protein, 5 aa, Artificial Sequence
  Description of Artificial Sequence: Synthetic peptide
NYPMW

SEQ ID NO: 3824 - protein, 17 aa, Artificial Sequence
  Description of Artificial Sequence: Synthetic peptide
SISPSGGSTYYADSVKG

SEQ ID NO: 3825 - protein, 15 aa, Artificial Sequence
  Description of Artificial Sequence: Synthetic peptide
DRAYGDYVGWNGFDY

SEQ ID NO: 3826 - protein, 11 aa, Artificial Sequence
  Description of Artificial Sequence: Synthetic peptide
RASQSISSFLA

SEQ ID NO: 3827 - protein, 7 aa, Artificial Sequence
  Description of Artificial Sequence: Synthetic peptide
DASYRAT

SEQ ID NO: 3828 - protein, 9 aa, Artificial Sequence
  Description of Artificial Sequence: Synthetic peptide
QQRGNWPIT

SEQ ID NO: 3829 - protein, 5 aa, Artificial Sequence
  Description of Artificial Sequence: Synthetic peptide
NYPMW

SEQ ID NO: 3830 - protein, 17 aa, Artificial Sequence
  Description of Artificial Sequence: Synthetic peptide
SIVPSGGATYYADSVKG

SEQ ID NO: 3831 - protein, 15 aa, Artificial Sequence
  Description of Artificial Sequence: Synthetic peptide
DRAYGDYVGWNGFDY

SEQ ID NO: 3832 - protein, 11 aa, Artificial Sequence
  Description of Artificial Sequence: Synthetic peptide
RASQSISSFLA

SEQ ID NO: 3833 - protein, 7 aa, Artificial Sequence
  Description of Artificial Sequence: Synthetic peptide
DASYRAT

SEQ ID NO: 3834 - protein, 9 aa, Artificial Sequence
  Description of Artificial Sequence: Synthetic peptide
QQRGNWPIT

SEQ ID NO: 3835 - protein, 5 aa, Artificial Sequence
  Description of Artificial Sequence: Synthetic peptide
NYPMW

SEQ ID NO: 3836 - protein, 17 aa, Artificial Sequence
  Description of Artificial Sequence: Synthetic peptide
SIYPSGGATFYADSVKG

SEQ ID NO: 3837 - protein, 15 aa, Artificial Sequence
  Description of Artificial Sequence: Synthetic peptide
DRAYGDYVGWNGFDY

SEQ ID NO: 3838 - protein, 11 aa, Artificial Sequence
  Description of Artificial Sequence: Synthetic peptide
RASQSISSFLA

SEQ ID NO: 3839 - protein, 7 aa, Artificial Sequence
  Description of Artificial Sequence: Synthetic peptide
DASYRAT

SEQ ID NO: 3840 - protein, 9 aa, Artificial Sequence
  Description of Artificial Sequence: Synthetic peptide
QQRGNWPIT

SEQ ID NO: 3841 - protein, 5 aa, Artificial Sequence
  Description of Artificial Sequence: Synthetic peptide
NYPMW

SEQ ID NO: 3842 - protein, 18 aa, Artificial Sequence
  Description of Artificial Sequence: Synthetic peptide
SIYPSGGKATYYADSVKG

SEQ ID NO: 3843 - protein, 15 aa, Artificial Sequence
  Description of Artificial Sequence: Synthetic peptide
DRAYGDYVGWNGFDY

SEQ ID NO: 3844 - protein, 11 aa, Artificial Sequence
  Description of Artificial Sequence: Synthetic peptide
RASQSISSFLA

SEQ ID NO: 3845 - protein, 7 aa, Artificial Sequence
  Description of Artificial Sequence: Synthetic peptide
DASYRAT

SEQ ID NO: 3846 - protein, 9 aa, Artificial Sequence
  Description of Artificial Sequence: Synthetic peptide
QQRGNWPIT

SEQ ID NO: 3847 - protein, 5 aa, Artificial Sequence
  Description of Artificial Sequence: Synthetic peptide
NYPMW

SEQ ID NO: 3848 - protein, 17 aa, Artificial Sequence
  Description of Artificial Sequence: Synthetic peptide
SIYPSGGPTFYADSVKG

SEQ ID NO: 3849 - protein, 15 aa, Artificial Sequence
  Description of Artificial Sequence: Synthetic peptide
DRAYGDYVGWNGFDY

SEQ ID NO: 3850 - protein, 11 aa, Artificial Sequence
  Description of Artificial Sequence: Synthetic peptide
RASQSISSFLA

SEQ ID NO: 3851 - protein, 7 aa, Artificial Sequence
  Description of Artificial Sequence: Synthetic peptide
DASYRAT

SEQ ID NO: 3852 - protein, 9 aa, Artificial Sequence
  Description of Artificial Sequence: Synthetic peptide
QQRGNWPIT

SEQ ID NO: 3853 - protein, 5 aa, Artificial Sequence
  Description of Artificial Sequence: Synthetic peptide
NYPMW

SEQ ID NO: 3854 - protein, 17 aa, Artificial Sequence
  Description of Artificial Sequence: Synthetic peptide
SIYSSGGATFYADSVKG

SEQ ID NO: 3855 - protein, 15 aa, Artificial Sequence
  Description of Artificial Sequence: Synthetic peptide
DRAYGDYVGWNGFDY

SEQ ID NO: 3856 - protein, 11 aa, Artificial Sequence
  Description of Artificial Sequence: Synthetic peptide
RASQSISSFLA

SEQ ID NO: 3857 - protein, 7 aa, Artificial Sequence
  Description of Artificial Sequence: Synthetic peptide
DASYRAT

SEQ ID NO: 3858 - protein, 9 aa, Artificial Sequence
  Description of Artificial Sequence: Synthetic peptide
QQRGNWPIT

SEQ ID NO: 3859 - protein, 5 aa, Artificial Sequence
  Description of Artificial Sequence: Synthetic peptide
NYPMW

SEQ ID NO: 3860 - protein, 17 aa, Artificial Sequence
  Description of Artificial Sequence: Synthetic peptide
VIYPSGGYTAYADSVKG

SEQ ID NO: 3861 - protein, 15 aa, Artificial Sequence
  Description of Artificial Sequence: Synthetic peptide
DRAYGDYVGWNGFDY

SEQ ID NO: 3862 - protein, 11 aa, Artificial Sequence
  Description of Artificial Sequence: Synthetic peptide
RASQSISSFLA

SEQ ID NO: 3863 - protein, 7 aa, Artificial Sequence
  Description of Artificial Sequence: Synthetic peptide
DASYRAT

SEQ ID NO: 3864 - protein, 9 aa, Artificial Sequence
  Description of Artificial Sequence: Synthetic peptide
QQRGNWPIT

SEQ ID NO: 3865 - protein, 5 aa, Artificial Sequence
  Description of Artificial Sequence: Synthetic peptide
NYPMW

SEQ ID NO: 3866 - protein, 17 aa, Artificial Sequence
  Description of Artificial Sequence: Synthetic peptide
YIGPSGGGTLYADSVKG

SEQ ID NO: 3867 - protein, 15 aa, Artificial Sequence
  Description of Artificial Sequence: Synthetic peptide
DRAYGDYVGWNGFDY

SEQ ID NO: 3868 - protein, 11 aa, Artificial Sequence
  Description of Artificial Sequence: Synthetic peptide
RASQSISSFLA

SEQ ID NO: 3869 - protein, 7 aa, Artificial Sequence
  Description of Artificial Sequence: Synthetic peptide
DASYRAT

SEQ ID NO: 3870 - protein, 9 aa, Artificial Sequence
  Description of Artificial Sequence: Synthetic peptide
QQRGNWPIT

SEQ ID NO: 3871 - protein, 5 aa, Artificial Sequence
  Description of Artificial Sequence: Synthetic peptide
NYPMW

SEQ ID NO: 3872 - protein, 17 aa, Artificial Sequence
  Description of Artificial Sequence: Synthetic peptide
YIRPSGGPTWYADSVKG

SEQ ID NO: 3873 - protein, 15 aa, Artificial Sequence
  Description of Artificial Sequence: Synthetic peptide
DRAYGDYVGWNGFDY

SEQ ID NO: 3874 - protein, 11 aa, Artificial Sequence
  Description of Artificial Sequence: Synthetic peptide
RASQSISSFLA

SEQ ID NO: 3875 - protein, 7 aa, Artificial Sequence
  Description of Artificial Sequence: Synthetic peptide
DASYRAT

SEQ ID NO: 3876 - protein, 9 aa, Artificial Sequence
  Description of Artificial Sequence: Synthetic peptide
QQRGNWPIT

SEQ ID NO: 3877 - protein, 5 aa, Artificial Sequence
  Description of Artificial Sequence: Synthetic peptide
NYPMW

SEQ ID NO: 3878 - protein, 17 aa, Artificial Sequence
  Description of Artificial Sequence: Synthetic peptide
YISPSGGGTFYADSVKG

SEQ ID NO: 3879 - protein, 15 aa, Artificial Sequence
  Description of Artificial Sequence: Synthetic peptide
DRAYGDYVGWNGFDY

SEQ ID NO: 3880 - protein, 11 aa, Artificial Sequence
  Description of Artificial Sequence: Synthetic peptide
RASQSISSFLA

SEQ ID NO: 3881 - protein, 7 aa, Artificial Sequence
  Description of Artificial Sequence: Synthetic peptide
DASYRAT

SEQ ID NO: 3882 - protein, 9 aa, Artificial Sequence
  Description of Artificial Sequence: Synthetic peptide
QQRGNWPIT

SEQ ID NO: 3883 - protein, 5 aa, Artificial Sequence
  Description of Artificial Sequence: Synthetic peptide
NYPMW

SEQ ID NO: 3884 - protein, 17 aa, Artificial Sequence
  Description of Artificial Sequence: Synthetic peptide
YISPSGGGTLYADSVKG

SEQ ID NO: 3885 - protein, 15 aa, Artificial Sequence
  Description of Artificial Sequence: Synthetic peptide
DRAYGDYVGWNGFDY

SEQ ID NO: 3886 - protein, 11 aa, Artificial Sequence
  Description of Artificial Sequence: Synthetic peptide
RASQSISSFLA

SEQ ID NO: 3887 - protein, 7 aa, Artificial Sequence
  Description of Artificial Sequence: Synthetic peptide
DASYRAT

SEQ ID NO: 3888 - protein, 9 aa, Artificial Sequence
  Description of Artificial Sequence: Synthetic peptide
QQRGNWPIT

SEQ ID NO: 3889 - protein, 5 aa, Artificial Sequence
  Description of Artificial Sequence: Synthetic peptide
NYPMW

SEQ ID NO: 3890 - protein, 17 aa, Artificial Sequence
  Description of Artificial Sequence: Synthetic peptide
YIVPSGGATFYADSVKG

SEQ ID NO: 3891 - protein, 15 aa, Artificial Sequence
  Description of Artificial Sequence: Synthetic peptide
DRAYGDYVGWNGFDY

SEQ ID NO: 3892 - protein, 11 aa, Artificial Sequence
  Description of Artificial Sequence: Synthetic peptide
RASQSISSFLA

SEQ ID NO: 3893 - protein, 7 aa, Artificial Sequence
  Description of Artificial Sequence: Synthetic peptide
DASYRAT

SEQ ID NO: 3894 - protein, 9 aa, Artificial Sequence
  Description of Artificial Sequence: Synthetic peptide
QQRGNWPIT

SEQ ID NO: 3895 - protein, 5 aa, Artificial Sequence
  Description of Artificial Sequence: Synthetic peptide
NYPMW

SEQ ID NO: 3896 - protein, 17 aa, Artificial Sequence
  Description of Artificial Sequence: Synthetic peptide
YIVPSGGMTYYADSVKG

SEQ ID NO: 3897 - protein, 15 aa, Artificial Sequence
  Description of Artificial Sequence: Synthetic peptide
DRAYGDYVGWNGFDY

SEQ ID NO: 3898 - protein, 11 aa, Artificial Sequence
  Description of Artificial Sequence: Synthetic peptide
RASQSISSFLA

SEQ ID NO: 3899 - protein, 7 aa, Artificial Sequence
  Description of Artificial Sequence: Synthetic peptide
DASYRAT

SEQ ID NO: 3900 - protein, 9 aa, Artificial Sequence
  Description of Artificial Sequence: Synthetic peptide
QQRGNWPIT

SEQ ID NO: 3901 - protein, 5 aa, Artificial Sequence
  Description of Artificial Sequence: Synthetic peptide
NYSMW

SEQ ID NO: 3902 - protein, 17 aa, Artificial Sequence
  Description of Artificial Sequence: Synthetic peptide
VIYPSGGYTSYADSVKG

SEQ ID NO: 3903 - protein, 15 aa, Artificial Sequence
  Description of Artificial Sequence: Synthetic peptide
DRAYGDYVGWNGFDY

SEQ ID NO: 3904 - protein, 11 aa, Artificial Sequence
  Description of Artificial Sequence: Synthetic peptide
RASQSISSFLA

SEQ ID NO: 3905 - protein, 7 aa, Artificial Sequence
  Description of Artificial Sequence: Synthetic peptide
DASYRAT

SEQ ID NO: 3906 - protein, 9 aa, Artificial Sequence
  Description of Artificial Sequence: Synthetic peptide
QQRGNWPIT

SEQ ID NO: 3907 - protein, 5 aa, Artificial Sequence
  Description of Artificial Sequence: Synthetic peptide
NYYMI

SEQ ID NO: 3908 - protein, 17 aa, Artificial Sequence
  Description of Artificial Sequence: Synthetic peptide
YISPSGGGTYYADSVKG

SEQ ID NO: 3909 - protein, 15 aa, Artificial Sequence
  Description of Artificial Sequence: Synthetic peptide
DRAYGDYVGWNGFDY

SEQ ID NO: 3910 - protein, 11 aa, Artificial Sequence
  Description of Artificial Sequence: Synthetic peptide
RASQSISSFLA

SEQ ID NO: 3911 - protein, 7 aa, Artificial Sequence
  Description of Artificial Sequence: Synthetic peptide
DASYRAT

SEQ ID NO: 3912 - protein, 9 aa, Artificial Sequence
  Description of Artificial Sequence: Synthetic peptide
QQRGNWPIT

SEQ ID NO: 3913 - protein, 5 aa, Artificial Sequence
  Description of Artificial Sequence: Synthetic peptide
PYAMW

SEQ ID NO: 3914 - protein, 17 aa, Artificial Sequence
  Description of Artificial Sequence: Synthetic peptide
YISSSGGGTFYADSVKG

SEQ ID NO: 3915 - protein, 15 aa, Artificial Sequence
  Description of Artificial Sequence: Synthetic peptide
DRAYGDYVGWNGFDY

SEQ ID NO: 3916 - protein, 11 aa, Artificial Sequence
  Description of Artificial Sequence: Synthetic peptide
RASQSISSFLA

SEQ ID NO: 3917 - protein, 7 aa, Artificial Sequence
  Description of Artificial Sequence: Synthetic peptide
DASYRAT

SEQ ID NO: 3918 - protein, 9 aa, Artificial Sequence
  Description of Artificial Sequence: Synthetic peptide
QQRGNWPIT

SEQ ID NO: 3919 - protein, 5 aa, Artificial Sequence
  Description of Artificial Sequence: Synthetic peptide
PYDMW

SEQ ID NO: 3920 - protein, 17 aa, Artificial Sequence
  Description of Artificial Sequence: Synthetic peptide
VISPSGGATFYADSVKG

SEQ ID NO: 3921 - protein, 15 aa, Artificial Sequence
  Description of Artificial Sequence: Synthetic peptide
DRAYGDYVGWNGFDY

SEQ ID NO: 3922 - protein, 11 aa, Artificial Sequence
  Description of Artificial Sequence: Synthetic peptide
RASQSISSFLA

SEQ ID NO: 3923 - protein, 7 aa, Artificial Sequence
  Description of Artificial Sequence: Synthetic peptide
DASYRAT

SEQ ID NO: 3924 - protein, 9 aa, Artificial Sequence
  Description of Artificial Sequence: Synthetic peptide
QQRGNWPIT

SEQ ID NO: 3925 - protein, 5 aa, Artificial Sequence
  Description of Artificial Sequence: Synthetic peptide
PYDMW

SEQ ID NO: 3926 - protein, 17 aa, Artificial Sequence
  Description of Artificial Sequence: Synthetic peptide
VISPSGGYTGYADSVKG

SEQ ID NO: 3927 - protein, 15 aa, Artificial Sequence
  Description of Artificial Sequence: Synthetic peptide
DRAYGDYVGWNGFDY

SEQ ID NO: 3928 - protein, 11 aa, Artificial Sequence
  Description of Artificial Sequence: Synthetic peptide
RASQSISSFLA

SEQ ID NO: 3929 - protein, 7 aa, Artificial Sequence
  Description of Artificial Sequence: Synthetic peptide
DASYRAT

SEQ ID NO: 3930 - protein, 9 aa, Artificial Sequence
  Description of Artificial Sequence: Synthetic peptide
QQRGNWPIT

SEQ ID NO: 3931 - protein, 5 aa, Artificial Sequence
  Description of Artificial Sequence: Synthetic peptide
PYDMW

SEQ ID NO: 3932 - protein, 17 aa, Artificial Sequence
  Description of Artificial Sequence: Synthetic peptide
VISSSGGFTDYADSVKG

SEQ ID NO: 3933 - protein, 15 aa, Artificial Sequence
  Description of Artificial Sequence: Synthetic peptide
DRAYGDYVGWNGFDY

SEQ ID NO: 3934 - protein, 11 aa, Artificial Sequence
  Description of Artificial Sequence: Synthetic peptide
RASQSISSFLA

SEQ ID NO: 3935 - protein, 7 aa, Artificial Sequence
  Description of Artificial Sequence: Synthetic peptide
DASYRAT

SEQ ID NO: 3936 - protein, 9 aa, Artificial Sequence
  Description of Artificial Sequence: Synthetic peptide
QQRGNWPIT

SEQ ID NO: 3937 - protein, 5 aa, Artificial Sequence
  Description of Artificial Sequence: Synthetic peptide
PYMMF

SEQ ID NO: 3938 - protein, 17 aa, Artificial Sequence
  Description of Artificial Sequence: Synthetic peptide
SISSSGGGTFYADSVKG

SEQ ID NO: 3939 - protein, 15 aa, Artificial Sequence
  Description of Artificial Sequence: Synthetic peptide
DRAYGDYVGWNGFDY

SEQ ID NO: 3940 - protein, 11 aa, Artificial Sequence
  Description of Artificial Sequence: Synthetic peptide
RASQSISSFLA

SEQ ID NO: 3941 - protein, 7 aa, Artificial Sequence
  Description of Artificial Sequence: Synthetic peptide
DASYRAT

SEQ ID NO: 3942 - protein, 9 aa, Artificial Sequence
  Description of Artificial Sequence: Synthetic peptide
QQRGNWPIT

SEQ ID NO: 3943 - protein, 5 aa, Artificial Sequence
  Description of Artificial Sequence: Synthetic peptide
PYMMI

SEQ ID NO: 3944 - protein, 17 aa, Artificial Sequence
  Description of Artificial Sequence: Synthetic peptide
SISSSGGYTGYADSVKG

SEQ ID NO: 3945 - protein, 15 aa, Artificial Sequence
  Description of Artificial Sequence: Synthetic peptide
DRAYGDYVGWNGFDY

SEQ ID NO: 3946 - protein, 11 aa, Artificial Sequence
  Description of Artificial Sequence: Synthetic peptide
RASQSISSFLA

SEQ ID NO: 3947 - protein, 7 aa, Artificial Sequence
  Description of Artificial Sequence: Synthetic peptide
DASYRAT

SEQ ID NO: 3948 - protein, 9 aa, Artificial Sequence
  Description of Artificial Sequence: Synthetic peptide
QQRGNWPIT

SEQ ID NO: 3949 - protein, 5 aa, Artificial Sequence
  Description of Artificial Sequence: Synthetic peptide
PYMMS

SEQ ID NO: 3950 - protein, 17 aa, Artificial Sequence
  Description of Artificial Sequence: Synthetic peptide
SIYSSGGATFYADSVKG

SEQ ID NO: 3951 - protein, 15 aa, Artificial Sequence
  Description of Artificial Sequence: Synthetic peptide
DRAYGDYVGWNGFDY

SEQ ID NO: 3952 - protein, 11 aa, Artificial Sequence
  Description of Artificial Sequence: Synthetic peptide
RASQSISSFLA

SEQ ID NO: 3953 - protein, 7 aa, Artificial Sequence
  Description of Artificial Sequence: Synthetic peptide
DASYRAT

SEQ ID NO: 3954 - protein, 9 aa, Artificial Sequence
  Description of Artificial Sequence: Synthetic peptide
QQRGNWPIT

SEQ ID NO: 3955 - protein, 5 aa, Artificial Sequence
  Description of Artificial Sequence: Synthetic peptide
PYMMW

SEQ ID NO: 3956 - protein, 17 aa, Artificial Sequence
  Description of Artificial Sequence: Synthetic peptide
SISSSGGGTFYADSVKG

SEQ ID NO: 3957 - protein, 15 aa, Artificial Sequence
  Description of Artificial Sequence: Synthetic peptide
DRAYGDYVGWNGFDY

SEQ ID NO: 3958 - protein, 11 aa, Artificial Sequence
  Description of Artificial Sequence: Synthetic peptide
RASQSISSFLA

SEQ ID NO: 3959 - protein, 7 aa, Artificial Sequence
  Description of Artificial Sequence: Synthetic peptide
DASYRAT

SEQ ID NO: 3960 - protein, 9 aa, Artificial Sequence
  Description of Artificial Sequence: Synthetic peptide
QQRGNWPIT

SEQ ID NO: 3961 - protein, 5 aa, Artificial Sequence
  Description of Artificial Sequence: Synthetic peptide
PYNMW

SEQ ID NO: 3962 - protein, 17 aa, Artificial Sequence
  Description of Artificial Sequence: Synthetic peptide
VIYPSGGATFYADSVKG

SEQ ID NO: 3963 - protein, 15 aa, Artificial Sequence
  Description of Artificial Sequence: Synthetic peptide
DRAYGDYVGWNGFDY

SEQ ID NO: 3964 - protein, 11 aa, Artificial Sequence
  Description of Artificial Sequence: Synthetic peptide
RASQSISSFLA

SEQ ID NO: 3965 - protein, 7 aa, Artificial Sequence
  Description of Artificial Sequence: Synthetic peptide
DASYRAT

SEQ ID NO: 3966 - protein, 9 aa, Artificial Sequence
  Description of Artificial Sequence: Synthetic peptide
QQRGNWPIT

SEQ ID NO: 3967 - protein, 5 aa, Artificial Sequence
  Description of Artificial Sequence: Synthetic peptide
PYPMF

SEQ ID NO: 3968 - protein, 17 aa, Artificial Sequence
  Description of Artificial Sequence: Synthetic peptide
SISPSGGATYYADSVKG

SEQ ID NO: 3969 - protein, 15 aa, Artificial Sequence
  Description of Artificial Sequence: Synthetic peptide
DRAYGDYVGWNGFDY

SEQ ID NO: 3970 - protein, 11 aa, Artificial Sequence
  Description of Artificial Sequence: Synthetic peptide
RASQSISSFLA

SEQ ID NO: 3971 - protein, 7 aa, Artificial Sequence
  Description of Artificial Sequence: Synthetic peptide
DASYRAT

SEQ ID NO: 3972 - protein, 9 aa, Artificial Sequence
  Description of Artificial Sequence: Synthetic peptide
QQRGNWPIT

SEQ ID NO: 3973 - protein, 5 aa, Artificial Sequence
  Description of Artificial Sequence: Synthetic peptide
PYPMI

SEQ ID NO: 3974 - protein, 17 aa, Artificial Sequence
  Description of Artificial Sequence: Synthetic peptide
YIGSSGGYTSYADSVKG

SEQ ID NO: 3975 - protein, 15 aa, Artificial Sequence
  Description of Artificial Sequence: Synthetic peptide
DRAYGDYVGWNGFDY

SEQ ID NO: 3976 - protein, 11 aa, Artificial Sequence
  Description of Artificial Sequence: Synthetic peptide
RASQSISSFLA

SEQ ID NO: 3977 - protein, 7 aa, Artificial Sequence
  Description of Artificial Sequence: Synthetic peptide
DASYRAT

SEQ ID NO: 3978 - protein, 9 aa, Artificial Sequence
  Description of Artificial Sequence: Synthetic peptide
QQRGNWPIT

SEQ ID NO: 3979 - protein, 5 aa, Artificial Sequence
  Description of Artificial Sequence: Synthetic peptide
PYPMI

SEQ ID NO: 3980 - protein, 17 aa, Artificial Sequence
  Description of Artificial Sequence: Synthetic peptide
YISPSGGFTDYADSVKG

SEQ ID NO: 3981 - protein, 15 aa, Artificial Sequence
  Description of Artificial Sequence: Synthetic peptide
DRAYGDYVGWNGFDY

SEQ ID NO: 3982 - protein, 11 aa, Artificial Sequence
  Description of Artificial Sequence: Synthetic peptide
RASQSISSFLA

SEQ ID NO: 3983 - protein, 7 aa, Artificial Sequence
  Description of Artificial Sequence: Synthetic peptide
DASYRAT

SEQ ID NO: 3984 - protein, 9 aa, Artificial Sequence
  Description of Artificial Sequence: Synthetic peptide
QQRGNWPIT

SEQ ID NO: 3985 - protein, 5 aa, Artificial Sequence
  Description of Artificial Sequence: Synthetic peptide
PYPMI

SEQ ID NO: 3986 - protein, 17 aa, Artificial Sequence
  Description of Artificial Sequence: Synthetic peptide
YISPSGGGTFYADSVKG

SEQ ID NO: 3987 - protein, 15 aa, Artificial Sequence
  Description of Artificial Sequence: Synthetic peptide
DRAYGDYVGWNGFDY

SEQ ID NO: 3988 - protein, 11 aa, Artificial Sequence
  Description of Artificial Sequence: Synthetic peptide
RASQSISSFLA

SEQ ID NO: 3989 - protein, 7 aa, Artificial Sequence
  Description of Artificial Sequence: Synthetic peptide
DASYRAT

SEQ ID NO: 3990 - protein, 9 aa, Artificial Sequence
  Description of Artificial Sequence: Synthetic peptide
QQRGNWPIT

SEQ ID NO: 3991 - protein, 5 aa, Artificial Sequence
  Description of Artificial Sequence: Synthetic peptide
PYPMI

SEQ ID NO: 3992 - protein, 17 aa, Artificial Sequence
  Description of Artificial Sequence: Synthetic peptide
YISSSGGGTYYADSVKG

SEQ ID NO: 3993 - protein, 15 aa, Artificial Sequence
  Description of Artificial Sequence: Synthetic peptide
DRAYGDYVGWNGFDY

SEQ ID NO: 3994 - protein, 11 aa, Artificial Sequence
  Description of Artificial Sequence: Synthetic peptide
RASQSISSFLA

SEQ ID NO: 3995 - protein, 7 aa, Artificial Sequence
  Description of Artificial Sequence: Synthetic peptide
DASYRAT

SEQ ID NO: 3996 - protein, 9 aa, Artificial Sequence
  Description of Artificial Sequence: Synthetic peptide
QQRGNWPIT

SEQ ID NO: 3997 - protein, 5 aa, Artificial Sequence
  Description of Artificial Sequence: Synthetic peptide
PYPMI

SEQ ID NO: 3998 - protein, 17 aa, Artificial Sequence
  Description of Artificial Sequence: Synthetic peptide
YISSSGGYTDYADSVKG

SEQ ID NO: 3999 - protein, 15 aa, Artificial Sequence
  Description of Artificial Sequence: Synthetic peptide
DRAYGDYVGWNGFDY

SEQ ID NO: 4000 - protein, 11 aa, Artificial Sequence
  Description of Artificial Sequence: Synthetic peptide
RASQSISSFLA

SEQ ID NO: 4001 - protein, 7 aa, Artificial Sequence
  Description of Artificial Sequence: Synthetic peptide
DASYRAT

SEQ ID NO: 4002 - protein, 9 aa, Artificial Sequence
  Description of Artificial Sequence: Synthetic peptide
QQRGNWPIT

SEQ ID NO: 4003 - protein, 5 aa, Artificial Sequence
  Description of Artificial Sequence: Synthetic peptide
PYPMW

SEQ ID NO: 4004 - protein, 17 aa, Artificial Sequence
  Description of Artificial Sequence: Synthetic peptide
YISPSGGWTDYADSVKG

SEQ ID NO: 4005 - protein, 15 aa, Artificial Sequence
  Description of Artificial Sequence: Synthetic peptide
DRAYGDYVGWNGFDY

SEQ ID NO: 4006 - protein, 11 aa, Artificial Sequence
  Description of Artificial Sequence: Synthetic peptide
RASQSISSFLA

SEQ ID NO: 4007 - protein, 7 aa, Artificial Sequence
  Description of Artificial Sequence: Synthetic peptide
DASYRAT

SEQ ID NO: 4008 - protein, 9 aa, Artificial Sequence
  Description of Artificial Sequence: Synthetic peptide
QQRGNWPIT

SEQ ID NO: 4009 - protein, 5 aa, Artificial Sequence
  Description of Artificial Sequence: Synthetic peptide
PYPMW

SEQ ID NO: 4010 - protein, 17 aa, Artificial Sequence
  Description of Artificial Sequence: Synthetic peptide
YIVPSGGKTFYADSVKG

SEQ ID NO: 4011 - protein, 15 aa, Artificial Sequence
  Description of Artificial Sequence: Synthetic peptide
DRAYGDYVGWNGFDY

SEQ ID NO: 4012 - protein, 11 aa, Artificial Sequence
  Description of Artificial Sequence: Synthetic peptide
RASQSISSFLA

SEQ ID NO: 4013 - protein, 7 aa, Artificial Sequence
  Description of Artificial Sequence: Synthetic peptide
DASYRAT

SEQ ID NO: 4014 - protein, 9 aa, Artificial Sequence
  Description of Artificial Sequence: Synthetic peptide
QQRGNWPIT

SEQ ID NO: 4015 - protein, 5 aa, Artificial Sequence
  Description of Artificial Sequence: Synthetic peptide
QYAMI

SEQ ID NO: 4016 - protein, 17 aa, Artificial Sequence
  Description of Artificial Sequence: Synthetic peptide
YISPSGGYTGYADSVKG

SEQ ID NO: 4017 - protein, 15 aa, Artificial Sequence
  Description of Artificial Sequence: Synthetic peptide
DRAYGDYVGWNGFDY

SEQ ID NO: 4018 - protein, 11 aa, Artificial Sequence
  Description of Artificial Sequence: Synthetic peptide
RASQSISSFLA

SEQ ID NO: 4019 - protein, 7 aa, Artificial Sequence
  Description of Artificial Sequence: Synthetic peptide
DASYRAT

SEQ ID NO: 4020 - protein, 9 aa, Artificial Sequence
  Description of Artificial Sequence: Synthetic peptide
QQRGNWPIT

SEQ ID NO: 4021 - protein, 5 aa, Artificial Sequence
  Description of Artificial Sequence: Synthetic peptide
QYDMI

SEQ ID NO: 4022 - protein, 17 aa, Artificial Sequence
  Description of Artificial Sequence: Synthetic peptide
YIGSSGGSTIYADSVKG

SEQ ID NO: 4023 - protein, 15 aa, Artificial Sequence
  Description of Artificial Sequence: Synthetic peptide
DRAYGDYVGWNGFDY

SEQ ID NO: 4024 - protein, 11 aa, Artificial Sequence
  Description of Artificial Sequence: Synthetic peptide
RASQSISSFLA

SEQ ID NO: 4025 - protein, 7 aa, Artificial Sequence
  Description of Artificial Sequence: Synthetic peptide
DASYRAT

SEQ ID NO: 4026 - protein, 9 aa, Artificial Sequence
  Description of Artificial Sequence: Synthetic peptide
QQRGNWPIT

SEQ ID NO: 4027 - protein, 5 aa, Artificial Sequence
  Description of Artificial Sequence: Synthetic peptide
QYDMW

SEQ ID NO: 4028 - protein, 17 aa, Artificial Sequence
  Description of Artificial Sequence: Synthetic peptide
VISPSGGHTSYADSVKG

SEQ ID NO: 4029 - protein, 15 aa, Artificial Sequence
  Description of Artificial Sequence: Synthetic peptide
DRAYGDYVGWNGFDY

SEQ ID NO: 4030 - protein, 11 aa, Artificial Sequence
  Description of Artificial Sequence: Synthetic peptide
RASQSISSFLA

SEQ ID NO: 4031 - protein, 7 aa, Artificial Sequence
  Description of Artificial Sequence: Synthetic peptide
DASYRAT

SEQ ID NO: 4032 - protein, 9 aa, Artificial Sequence
  Description of Artificial Sequence: Synthetic peptide
QQRGNWPIT

SEQ ID NO: 4033 - protein, 5 aa, Artificial Sequence
  Description of Artificial Sequence: Synthetic peptide
QYDMW

SEQ ID NO: 4034 - protein, 17 aa, Artificial Sequence
  Description of Artificial Sequence: Synthetic peptide
VISSSGGATWYADSVKG

SEQ ID NO: 4035 - protein, 15 aa, Artificial Sequence
  Description of Artificial Sequence: Synthetic peptide
DRAYGDYVGWNGFDY

SEQ ID NO: 4036 - protein, 11 aa, Artificial Sequence
  Description of Artificial Sequence: Synthetic peptide
RASQSISSFLA

SEQ ID NO: 4037 - protein, 7 aa, Artificial Sequence
  Description of Artificial Sequence: Synthetic peptide
DASYRAT

SEQ ID NO: 4038 - protein, 9 aa, Artificial Sequence
  Description of Artificial Sequence: Synthetic peptide
QQRGNWPIT

SEQ ID NO: 4039 - protein, 5 aa, Artificial Sequence
  Description of Artificial Sequence: Synthetic peptide
QYDMW

SEQ ID NO: 4040 - protein, 17 aa, Artificial Sequence
  Description of Artificial Sequence: Synthetic peptide
VIYPSGGPTFYADSVKG

SEQ ID NO: 4041 - protein, 15 aa, Artificial Sequence
  Description of Artificial Sequence: Synthetic peptide
DRAYGDYVGWNGFDY

SEQ ID NO: 4042 - protein, 11 aa, Artificial Sequence
  Description of Artificial Sequence: Synthetic peptide
RASQSISSFLA

SEQ ID NO: 4043 - protein, 7 aa, Artificial Sequence
  Description of Artificial Sequence: Synthetic peptide
DASYRAT

SEQ ID NO: 4044 - protein, 9 aa, Artificial Sequence
  Description of Artificial Sequence: Synthetic peptide
QQRGNWPIT

SEQ ID NO: 4045 - protein, 5 aa, Artificial Sequence
  Description of Artificial Sequence: Synthetic peptide
QYDMW

SEQ ID NO: 4046 - protein, 17 aa, Artificial Sequence
  Description of Artificial Sequence: Synthetic peptide
VIYPSGGTTFYADSVKG

SEQ ID NO: 4047 - protein, 15 aa, Artificial Sequence
  Description of Artificial Sequence: Synthetic peptide
DRAYGDYVGWNGFDY

SEQ ID NO: 4048 - protein, 11 aa, Artificial Sequence
  Description of Artificial Sequence: Synthetic peptide
RASQSISSFLA

SEQ ID NO: 4049 - protein, 7 aa, Artificial Sequence
  Description of Artificial Sequence: Synthetic peptide
DASYRAT

SEQ ID NO: 4050 - protein, 9 aa, Artificial Sequence
  Description of Artificial Sequence: Synthetic peptide
QQRGNWPIT

SEQ ID NO: 4051 - protein, 5 aa, Artificial Sequence
  Description of Artificial Sequence: Synthetic peptide
QYDMW

SEQ ID NO: 4052 - protein, 17 aa, Artificial Sequence
  Description of Artificial Sequence: Synthetic peptide
VIYPSGGYTDYADSVKG

SEQ ID NO: 4053 - protein, 15 aa, Artificial Sequence
  Description of Artificial Sequence: Synthetic peptide
DRAYGDYVGWNGFDY

SEQ ID NO: 4054 - protein, 11 aa, Artificial Sequence
  Description of Artificial Sequence: Synthetic peptide
RASQSISSFLA

SEQ ID NO: 4055 - protein, 7 aa, Artificial Sequence
  Description of Artificial Sequence: Synthetic peptide
DASYRAT

SEQ ID NO: 4056 - protein, 9 aa, Artificial Sequence
  Description of Artificial Sequence: Synthetic peptide
QQRGNWPIT

SEQ ID NO: 4057 - protein, 5 aa, Artificial Sequence
  Description of Artificial Sequence: Synthetic peptide
QYDMW

SEQ ID NO: 4058 - protein, 16 aa, Artificial Sequence
  Description of Artificial Sequence: Synthetic peptide
VIYPSGTTFYADSVKG

SEQ ID NO: 4059 - protein, 15 aa, Artificial Sequence
  Description of Artificial Sequence: Synthetic peptide
DRAYGDYVGWNGFDY

SEQ ID NO: 4060 - protein, 11 aa, Artificial Sequence
  Description of Artificial Sequence: Synthetic peptide
RASQSISSFLA

SEQ ID NO: 4061 - protein, 7 aa, Artificial Sequence
  Description of Artificial Sequence: Synthetic peptide
DASYRAT

SEQ ID NO: 4062 - protein, 9 aa, Artificial Sequence
  Description of Artificial Sequence: Synthetic peptide
QQRGNWPIT

SEQ ID NO: 4063 - protein, 5 aa, Artificial Sequence
  Description of Artificial Sequence: Synthetic peptide
QYDMW

SEQ ID NO: 4064 - protein, 17 aa, Artificial Sequence
  Description of Artificial Sequence: Synthetic peptide
YIVPSGGFTDYADSVKG

SEQ ID NO: 4065 - protein, 15 aa, Artificial Sequence
  Description of Artificial Sequence: Synthetic peptide
DRAYGDYVGWNGFDY

SEQ ID NO: 4066 - protein, 11 aa, Artificial Sequence
  Description of Artificial Sequence: Synthetic peptide
RASQSISSFLA

SEQ ID NO: 4067 - protein, 7 aa, Artificial Sequence
  Description of Artificial Sequence: Synthetic peptide
DASYRAT

SEQ ID NO: 4068 - protein, 9 aa, Artificial Sequence
  Description of Artificial Sequence: Synthetic peptide
QQRGNWPIT

SEQ ID NO: 4069 - protein, 5 aa, Artificial Sequence
  Description of Artificial Sequence: Synthetic peptide
QYGMW

SEQ ID NO: 4070 - protein, 17 aa, Artificial Sequence
  Description of Artificial Sequence: Synthetic peptide
YIYPSGGGTYYADSVKG

SEQ ID NO: 4071 - protein, 15 aa, Artificial Sequence
  Description of Artificial Sequence: Synthetic peptide
DRAYGDYVGWNGFDY

SEQ ID NO: 4072 - protein, 11 aa, Artificial Sequence
  Description of Artificial Sequence: Synthetic peptide
RASQSISSFLA

SEQ ID NO: 4073 - protein, 7 aa, Artificial Sequence
  Description of Artificial Sequence: Synthetic peptide
DASYRAT

SEQ ID NO: 4074 - protein, 9 aa, Artificial Sequence
  Description of Artificial Sequence: Synthetic peptide
QQRGNWPIT

SEQ ID NO: 4075 - protein, 5 aa, Artificial Sequence
  Description of Artificial Sequence: Synthetic peptide
QYMMI

SEQ ID NO: 4076 - protein, 17 aa, Artificial Sequence
  Description of Artificial Sequence: Synthetic peptide
YIVPSGGTTGYADSVKG

SEQ ID NO: 4077 - protein, 15 aa, Artificial Sequence
  Description of Artificial Sequence: Synthetic peptide
DRAYGDYVGWNGFDY

SEQ ID NO: 4078 - protein, 11 aa, Artificial Sequence
  Description of Artificial Sequence: Synthetic peptide
RASQSISSFLA

SEQ ID NO: 4079 - protein, 7 aa, Artificial Sequence
  Description of Artificial Sequence: Synthetic peptide
DASYRAT

SEQ ID NO: 4080 - protein, 9 aa, Artificial Sequence
  Description of Artificial Sequence: Synthetic peptide
QQRGNWPIT

SEQ ID NO: 4081 - protein, 5 aa, Artificial Sequence
  Description of Artificial Sequence: Synthetic peptide
QYPMF

SEQ ID NO: 4082 - protein, 17 aa, Artificial Sequence
  Description of Artificial Sequence: Synthetic peptide
YIVPSGGYTSYADSVKG

SEQ ID NO: 4083 - protein, 15 aa, Artificial Sequence
  Description of Artificial Sequence: Synthetic peptide
DRAYGDYVGWNGFDY

SEQ ID NO: 4084 - protein, 11 aa, Artificial Sequence
  Description of Artificial Sequence: Synthetic peptide
RASQSISSFLA

SEQ ID NO: 4085 - protein, 7 aa, Artificial Sequence
  Description of Artificial Sequence: Synthetic peptide
DASYRAT

SEQ ID NO: 4086 - protein, 9 aa, Artificial Sequence
  Description of Artificial Sequence: Synthetic peptide
QQRGNWPIT

SEQ ID NO: 4087 - protein, 5 aa, Artificial Sequence
  Description of Artificial Sequence: Synthetic peptide
QYPMI

SEQ ID NO: 4088 - protein, 17 aa, Artificial Sequence
  Description of Artificial Sequence: Synthetic peptide
YIVPSGGWTSYADSVKG

SEQ ID NO: 4089 - protein, 15 aa, Artificial Sequence
  Description of Artificial Sequence: Synthetic peptide
DRAYGDYVGWNGFDY

SEQ ID NO: 4090 - protein, 11 aa, Artificial Sequence
  Description of Artificial Sequence: Synthetic peptide
RASQSISSFLA

SEQ ID NO: 4091 - protein, 7 aa, Artificial Sequence
  Description of Artificial Sequence: Synthetic peptide
DASYRAT

SEQ ID NO: 4092 - protein, 9 aa, Artificial Sequence
  Description of Artificial Sequence: Synthetic peptide
QQRGNWPIT

SEQ ID NO: 4093 - protein, 5 aa, Artificial Sequence
  Description of Artificial Sequence: Synthetic peptide
QYPMM

SEQ ID NO: 4094 - protein, 17 aa, Artificial Sequence
  Description of Artificial Sequence: Synthetic peptide
YIYPSGGATYYADSVKG

SEQ ID NO: 4095 - protein, 15 aa, Artificial Sequence
  Description of Artificial Sequence: Synthetic peptide
DRAYGDYVGWNGFDY

SEQ ID NO: 4096 - protein, 11 aa, Artificial Sequence
  Description of Artificial Sequence: Synthetic peptide
RASQSISSFLA

SEQ ID NO: 4097 - protein, 7 aa, Artificial Sequence
  Description of Artificial Sequence: Synthetic peptide
DASYRAT

SEQ ID NO: 4098 - protein, 9 aa, Artificial Sequence
  Description of Artificial Sequence: Synthetic peptide
QQRGNWPIT

SEQ ID NO: 4099 - protein, 5 aa, Artificial Sequence
  Description of Artificial Sequence: Synthetic peptide
QYPMM

SEQ ID NO: 4100 - protein, 17 aa, Artificial Sequence
  Description of Artificial Sequence: Synthetic peptide
YIYPSGGGTYYADSVKG

SEQ ID NO: 4101 - protein, 15 aa, Artificial Sequence
  Description of Artificial Sequence: Synthetic peptide
DRAYGDYVGWNGFDY

SEQ ID NO: 4102 - protein, 11 aa, Artificial Sequence
  Description of Artificial Sequence: Synthetic peptide
RASQSISSFLA

SEQ ID NO: 4103 - protein, 7 aa, Artificial Sequence
  Description of Artificial Sequence: Synthetic peptide
DASYRAT

SEQ ID NO: 4104 - protein, 9 aa, Artificial Sequence
  Description of Artificial Sequence: Synthetic peptide
QQRGNWPIT

SEQ ID NO: 4105 - protein, 5 aa, Artificial Sequence
  Description of Artificial Sequence: Synthetic peptide
QYPMW

SEQ ID NO: 4106 - protein, 17 aa, Artificial Sequence
  Description of Artificial Sequence: Synthetic peptide
SISPSGGATYYADSVKG

SEQ ID NO: 4107 - protein, 15 aa, Artificial Sequence
  Description of Artificial Sequence: Synthetic peptide
DRAYGDYVGWNGFDY

SEQ ID NO: 4108 - protein, 11 aa, Artificial Sequence
  Description of Artificial Sequence: Synthetic peptide
RASQSISSFLA

SEQ ID NO: 4109 - protein, 7 aa, Artificial Sequence
  Description of Artificial Sequence: Synthetic peptide
DASYRAT

SEQ ID NO: 4110 - protein, 9 aa, Artificial Sequence
  Description of Artificial Sequence: Synthetic peptide
QQRGNWPIT

SEQ ID NO: 4111 - protein, 5 aa, Artificial Sequence
  Description of Artificial Sequence: Synthetic peptide
QYPMW

SEQ ID NO: 4112 - protein, 17 aa, Artificial Sequence
  Description of Artificial Sequence: Synthetic peptide
SIYPSGGGTFYADSVKG

SEQ ID NO: 4113 - protein, 15 aa, Artificial Sequence
  Description of Artificial Sequence: Synthetic peptide
DRAYGDYVGWNGFDY

SEQ ID NO: 4114 - protein, 11 aa, Artificial Sequence
  Description of Artificial Sequence: Synthetic peptide
RASQSISSFLA

SEQ ID NO: 4115 - protein, 7 aa, Artificial Sequence
  Description of Artificial Sequence: Synthetic peptide
DASYRAT

SEQ ID NO: 4116 - protein, 9 aa, Artificial Sequence
  Description of Artificial Sequence: Synthetic peptide
QQRGNWPIT

SEQ ID NO: 4117 - protein, 5 aa, Artificial Sequence
  Description of Artificial Sequence: Synthetic peptide
QYPMW

SEQ ID NO: 4118 - protein, 17 aa, Artificial Sequence
  Description of Artificial Sequence: Synthetic peptide
SIYSSGGATYYADSVKG

SEQ ID NO: 4119 - protein, 15 aa, Artificial Sequence
  Description of Artificial Sequence: Synthetic peptide
DRAYGDYVGWNGFDY

SEQ ID NO: 4120 - protein, 11 aa, Artificial Sequence
  Description of Artificial Sequence: Synthetic peptide
RASQSISSFLA

SEQ ID NO: 4121 - protein, 7 aa, Artificial Sequence
  Description of Artificial Sequence: Synthetic peptide
DASYRAT

SEQ ID NO: 4122 - protein, 9 aa, Artificial Sequence
  Description of Artificial Sequence: Synthetic peptide
QQRGNWPIT

SEQ ID NO: 4123 - protein, 5 aa, Artificial Sequence
  Description of Artificial Sequence: Synthetic peptide
QYPMW

SEQ ID NO: 4124 - protein, 17 aa, Artificial Sequence
  Description of Artificial Sequence: Synthetic peptide
VIYPSGGFTSYADSVKG

SEQ ID NO: 4125 - protein, 15 aa, Artificial Sequence
  Description of Artificial Sequence: Synthetic peptide
DRAYGDYVGWNGFDY

SEQ ID NO: 4126 - protein, 11 aa, Artificial Sequence
  Description of Artificial Sequence: Synthetic peptide
RASQSISSFLA

SEQ ID NO: 4127 - protein, 7 aa, Artificial Sequence
  Description of Artificial Sequence: Synthetic peptide
DASYRAT

SEQ ID NO: 4128 - protein, 9 aa, Artificial Sequence
  Description of Artificial Sequence: Synthetic peptide
QQRGNWPIT

SEQ ID NO: 4129 - protein, 5 aa, Artificial Sequence
  Description of Artificial Sequence: Synthetic peptide
QYPMW

SEQ ID NO: 4130 - protein, 17 aa, Artificial Sequence
  Description of Artificial Sequence: Synthetic peptide
VIYPSGGYTGYADSVKG

SEQ ID NO: 4131 - protein, 15 aa, Artificial Sequence
  Description of Artificial Sequence: Synthetic peptide
DRAYGDYVGWNGFDY

SEQ ID NO: 4132 - protein, 11 aa, Artificial Sequence
  Description of Artificial Sequence: Synthetic peptide
RASQSISSFLA

SEQ ID NO: 4133 - protein, 7 aa, Artificial Sequence
  Description of Artificial Sequence: Synthetic peptide
DASYRAT

SEQ ID NO: 4134 - protein, 9 aa, Artificial Sequence
  Description of Artificial Sequence: Synthetic peptide
QQRGNWPIT

SEQ ID NO: 4135 - protein, 5 aa, Artificial Sequence
  Description of Artificial Sequence: Synthetic peptide
QYQMW

SEQ ID NO: 4136 - protein, 17 aa, Artificial Sequence
  Description of Artificial Sequence: Synthetic peptide
VIYPSGGATYYADSVKG

SEQ ID NO: 4137 - protein, 15 aa, Artificial Sequence
  Description of Artificial Sequence: Synthetic peptide
DRAYGDYVGWNGFDY

SEQ ID NO: 4138 - protein, 11 aa, Artificial Sequence
  Description of Artificial Sequence: Synthetic peptide
RASQSISSFLA

SEQ ID NO: 4139 - protein, 7 aa, Artificial Sequence
  Description of Artificial Sequence: Synthetic peptide
DASYRAT

SEQ ID NO: 4140 - protein, 9 aa, Artificial Sequence
  Description of Artificial Sequence: Synthetic peptide
QQRGNWPIT

SEQ ID NO: 4141 - protein, 5 aa, Artificial Sequence
  Description of Artificial Sequence: Synthetic peptide
QYSMI

SEQ ID NO: 4142 - protein, 17 aa, Artificial Sequence
  Description of Artificial Sequence: Synthetic peptide
YIVPSGGYTSYADSVKG

SEQ ID NO: 4143 - protein, 15 aa, Artificial Sequence
  Description of Artificial Sequence: Synthetic peptide
DRAYGDYVGWNGFDY

SEQ ID NO: 4144 - protein, 11 aa, Artificial Sequence
  Description of Artificial Sequence: Synthetic peptide
RASQSISSFLA

SEQ ID NO: 4145 - protein, 7 aa, Artificial Sequence
  Description of Artificial Sequence: Synthetic peptide
DASYRAT

SEQ ID NO: 4146 - protein, 9 aa, Artificial Sequence
  Description of Artificial Sequence: Synthetic peptide
QQRGNWPIT

SEQ ID NO: 4147 - protein, 5 aa, Artificial Sequence
  Description of Artificial Sequence: Synthetic peptide
QYSMW

SEQ ID NO: 4148 - protein, 17 aa, Artificial Sequence
  Description of Artificial Sequence: Synthetic peptide
SIVPSGGATFYADSVKG

SEQ ID NO: 4149 - protein, 15 aa, Artificial Sequence
  Description of Artificial Sequence: Synthetic peptide
DRAYGDYVGWNGFDY

SEQ ID NO: 4150 - protein, 11 aa, Artificial Sequence
  Description of Artificial Sequence: Synthetic peptide
RASQSISSFLA

SEQ ID NO: 4151 - protein, 7 aa, Artificial Sequence
  Description of Artificial Sequence: Synthetic peptide
DASYRAT

SEQ ID NO: 4152 - protein, 9 aa, Artificial Sequence
  Description of Artificial Sequence: Synthetic peptide
QQRGNWPIT

SEQ ID NO: 4153 - protein, 5 aa, Artificial Sequence
  Description of Artificial Sequence: Synthetic peptide
QYSMW

SEQ ID NO: 4154 - protein, 17 aa, Artificial Sequence
  Description of Artificial Sequence: Synthetic peptide
VIYSSGGATFYADSVKG

SEQ ID NO: 4155 - protein, 15 aa, Artificial Sequence
  Description of Artificial Sequence: Synthetic peptide
DRAYGDYVGWNGFDY

SEQ ID NO: 4156 - protein, 11 aa, Artificial Sequence
  Description of Artificial Sequence: Synthetic peptide
RASQSISSFLA

SEQ ID NO: 4157 - protein, 7 aa, Artificial Sequence
  Description of Artificial Sequence: Synthetic peptide
DASYRAT

SEQ ID NO: 4158 - protein, 9 aa, Artificial Sequence
  Description of Artificial Sequence: Synthetic peptide
QQRGNWPIT

SEQ ID NO: 4159 - protein, 5 aa, Artificial Sequence
  Description of Artificial Sequence: Synthetic peptide
QYSMW

SEQ ID NO: 4160 - protein, 17 aa, Artificial Sequence
  Description of Artificial Sequence: Synthetic peptide
VIYSSGSATFYADSVKG

SEQ ID NO: 4161 - protein, 15 aa, Artificial Sequence
  Description of Artificial Sequence: Synthetic peptide
DRAYGDYVGWNGFDY

SEQ ID NO: 4162 - protein, 11 aa, Artificial Sequence
  Description of Artificial Sequence: Synthetic peptide
RASQSISSFLA

SEQ ID NO: 4163 - protein, 7 aa, Artificial Sequence
  Description of Artificial Sequence: Synthetic peptide
DASYRAT

SEQ ID NO: 4164 - protein, 9 aa, Artificial Sequence
  Description of Artificial Sequence: Synthetic peptide
QQRGNWPIT

SEQ ID NO: 4165 - protein, 5 aa, Artificial Sequence
  Description of Artificial Sequence: Synthetic peptide
QYWMW

SEQ ID NO: 4166 - protein, 17 aa, Artificial Sequence
  Description of Artificial Sequence: Synthetic peptide
VISSSGGGTYYADSVKG

SEQ ID NO: 4167 - protein, 15 aa, Artificial Sequence
  Description of Artificial Sequence: Synthetic peptide
DRAYGDYVGWNGFDY

SEQ ID NO: 4168 - protein, 11 aa, Artificial Sequence
  Description of Artificial Sequence: Synthetic peptide
RASQSISSFLA

SEQ ID NO: 4169 - protein, 7 aa, Artificial Sequence
  Description of Artificial Sequence: Synthetic peptide
DASYRAT

SEQ ID NO: 4170 - protein, 9 aa, Artificial Sequence
  Description of Artificial Sequence: Synthetic peptide
QQRGNWPIT

SEQ ID NO: 4171 - protein, 5 aa, Artificial Sequence
  Description of Artificial Sequence: Synthetic peptide
QYWMW

SEQ ID NO: 4172 - protein, 17 aa, Artificial Sequence
  Description of Artificial Sequence: Synthetic peptide
VIVPSGGKTFYADSVKG

SEQ ID NO: 4173 - protein, 15 aa, Artificial Sequence
  Description of Artificial Sequence: Synthetic peptide
DRAYGDYVGWNGFDY

SEQ ID NO: 4174 - protein, 11 aa, Artificial Sequence
  Description of Artificial Sequence: Synthetic peptide
RASQSISSFLA

SEQ ID NO: 4175 - protein, 7 aa, Artificial Sequence
  Description of Artificial Sequence: Synthetic peptide
DASYRAT

SEQ ID NO: 4176 - protein, 9 aa, Artificial Sequence
  Description of Artificial Sequence: Synthetic peptide
QQRGNWPIT

SEQ ID NO: 4177 - protein, 5 aa, Artificial Sequence
  Description of Artificial Sequence: Synthetic peptide
RYAMI

SEQ ID NO: 4178 - protein, 17 aa, Artificial Sequence
  Description of Artificial Sequence: Synthetic peptide
YISPSGGFTDYADSVKG

SEQ ID NO: 4179 - protein, 15 aa, Artificial Sequence
  Description of Artificial Sequence: Synthetic peptide
DRAYGDYVGWNGFDY

SEQ ID NO: 4180 - protein, 11 aa, Artificial Sequence
  Description of Artificial Sequence: Synthetic peptide
RASQSISSFLA

SEQ ID NO: 4181 - protein, 7 aa, Artificial Sequence
  Description of Artificial Sequence: Synthetic peptide
DASYRAT

SEQ ID NO: 4182 - protein, 9 aa, Artificial Sequence
  Description of Artificial Sequence: Synthetic peptide
QQRGNWPIT

SEQ ID NO: 4183 - protein, 5 aa, Artificial Sequence
  Description of Artificial Sequence: Synthetic peptide
RYAMM

SEQ ID NO: 4184 - protein, 17 aa, Artificial Sequence
  Description of Artificial Sequence: Synthetic peptide
YISPSGGFTDYADSVKG

SEQ ID NO: 4185 - protein, 15 aa, Artificial Sequence
  Description of Artificial Sequence: Synthetic peptide
DRAYGDYVGWNGFDY

SEQ ID NO: 4186 - protein, 11 aa, Artificial Sequence
  Description of Artificial Sequence: Synthetic peptide
RASQSISSFLA

SEQ ID NO: 4187 - protein, 7 aa, Artificial Sequence
  Description of Artificial Sequence: Synthetic peptide
DASYRAT

SEQ ID NO: 4188 - protein, 9 aa, Artificial Sequence
  Description of Artificial Sequence: Synthetic peptide
QQRGNWPIT

SEQ ID NO: 4189 - protein, 5 aa, Artificial Sequence
  Description of Artificial Sequence: Synthetic peptide
RYAMW

SEQ ID NO: 4190 - protein, 17 aa, Artificial Sequence
  Description of Artificial Sequence: Synthetic peptide
SIYPSGGGTFYADSVKG

SEQ ID NO: 4191 - protein, 15 aa, Artificial Sequence
  Description of Artificial Sequence: Synthetic peptide
DRAYGDYVGWNGFDY

SEQ ID NO: 4192 - protein, 11 aa, Artificial Sequence
  Description of Artificial Sequence: Synthetic peptide
RASQSISSFLA

SEQ ID NO: 4193 - protein, 7 aa, Artificial Sequence
  Description of Artificial Sequence: Synthetic peptide
DASYRAT

SEQ ID NO: 4194 - protein, 9 aa, Artificial Sequence
  Description of Artificial Sequence: Synthetic peptide
QQRGNWPIT

SEQ ID NO: 4195 - protein, 5 aa, Artificial Sequence
  Description of Artificial Sequence: Synthetic peptide
RYAMW

SEQ ID NO: 4196 - protein, 17 aa, Artificial Sequence
  Description of Artificial Sequence: Synthetic peptide
YIVPSGGYTDYADSVKG

SEQ ID NO: 4197 - protein, 15 aa, Artificial Sequence
  Description of Artificial Sequence: Synthetic peptide
DRAYGDYVGWNGFDY

SEQ ID NO: 4198 - protein, 11 aa, Artificial Sequence
  Description of Artificial Sequence: Synthetic peptide
RASQSISSFLA

SEQ ID NO: 4199 - protein, 7 aa, Artificial Sequence
  Description of Artificial Sequence: Synthetic peptide
DASYRAT

SEQ ID NO: 4200 - protein, 9 aa, Artificial Sequence
  Description of Artificial Sequence: Synthetic peptide
QQRGNWPIT

SEQ ID NO: 4201 - protein, 5 aa, Artificial Sequence
  Description of Artificial Sequence: Synthetic peptide
RYDMF

SEQ ID NO: 4202 - protein, 17 aa, Artificial Sequence
  Description of Artificial Sequence: Synthetic peptide
SISPSGGGTYYADSVKG

SEQ ID NO: 4203 - protein, 15 aa, Artificial Sequence
  Description of Artificial Sequence: Synthetic peptide
DRAYGDYVGWNGFDY

SEQ ID NO: 4204 - protein, 11 aa, Artificial Sequence
  Description of Artificial Sequence: Synthetic peptide
RASQSISSFLA

SEQ ID NO: 4205 - protein, 7 aa, Artificial Sequence
  Description of Artificial Sequence: Synthetic peptide
DASYRAT

SEQ ID NO: 4206 - protein, 9 aa, Artificial Sequence
  Description of Artificial Sequence: Synthetic peptide
QQRGNWPIT

SEQ ID NO: 4207 - protein, 5 aa, Artificial Sequence
  Description of Artificial Sequence: Synthetic peptide
RYDMW

SEQ ID NO: 4208 - protein, 17 aa, Artificial Sequence
  Description of Artificial Sequence: Synthetic peptide
SISSSGGFTGYADSVKG

SEQ ID NO: 4209 - protein, 15 aa, Artificial Sequence
  Description of Artificial Sequence: Synthetic peptide
DRAYGDYVGWNGFDY

SEQ ID NO: 4210 - protein, 11 aa, Artificial Sequence
  Description of Artificial Sequence: Synthetic peptide
RASQSISSFLA

SEQ ID NO: 4211 - protein, 7 aa, Artificial Sequence
  Description of Artificial Sequence: Synthetic peptide
DASYRAT

SEQ ID NO: 4212 - protein, 9 aa, Artificial Sequence
  Description of Artificial Sequence: Synthetic peptide
QQRGNWPIT

SEQ ID NO: 4213 - protein, 5 aa, Artificial Sequence
  Description of Artificial Sequence: Synthetic peptide
RYDMW

SEQ ID NO: 4214 - protein, 17 aa, Artificial Sequence
  Description of Artificial Sequence: Synthetic peptide
VISPSGGATFYADSVKG

SEQ ID NO: 4215 - protein, 15 aa, Artificial Sequence
  Description of Artificial Sequence: Synthetic peptide
DRAYGDYVGWNGFDY

SEQ ID NO: 4216 - protein, 11 aa, Artificial Sequence
  Description of Artificial Sequence: Synthetic peptide
RASQSISSFLA

SEQ ID NO: 4217 - protein, 7 aa, Artificial Sequence
  Description of Artificial Sequence: Synthetic peptide
DASYRAT

SEQ ID NO: 4218 - protein, 9 aa, Artificial Sequence
  Description of Artificial Sequence: Synthetic peptide
QQRGNWPIT

SEQ ID NO: 4219 - protein, 5 aa, Artificial Sequence
  Description of Artificial Sequence: Synthetic peptide
RYDMW

SEQ ID NO: 4220 - protein, 17 aa, Artificial Sequence
  Description of Artificial Sequence: Synthetic peptide
VIYPSGGHTMYADSVKG

SEQ ID NO: 4221 - protein, 15 aa, Artificial Sequence
  Description of Artificial Sequence: Synthetic peptide
DRAYGDYVGWNGFDY

SEQ ID NO: 4222 - protein, 11 aa, Artificial Sequence
  Description of Artificial Sequence: Synthetic peptide
RASQSISSFLA

SEQ ID NO: 4223 - protein, 7 aa, Artificial Sequence
  Description of Artificial Sequence: Synthetic peptide
DASYRAT

SEQ ID NO: 4224 - protein, 9 aa, Artificial Sequence
  Description of Artificial Sequence: Synthetic peptide
QQRGNWPIT

SEQ ID NO: 4225 - protein, 5 aa, Artificial Sequence
  Description of Artificial Sequence: Synthetic peptide
RYDMW

SEQ ID NO: 4226 - protein, 17 aa, Artificial Sequence
  Description of Artificial Sequence: Synthetic peptide
WISPSGGGTQYADSVKG

SEQ ID NO: 4227 - protein, 15 aa, Artificial Sequence
  Description of Artificial Sequence: Synthetic peptide
DRAYGDYVGWNGFDY

SEQ ID NO: 4228 - protein, 11 aa, Artificial Sequence
  Description of Artificial Sequence: Synthetic peptide
RASQSISSFLA

SEQ ID NO: 4229 - protein, 7 aa, Artificial Sequence
  Description of Artificial Sequence: Synthetic peptide
DASYRAT

SEQ ID NO: 4230 - protein, 9 aa, Artificial Sequence
  Description of Artificial Sequence: Synthetic peptide
QQRGNWPIT

SEQ ID NO: 4231 - protein, 5 aa, Artificial Sequence
  Description of Artificial Sequence: Synthetic peptide
RYDMW

SEQ ID NO: 4232 - protein, 17 aa, Artificial Sequence
  Description of Artificial Sequence: Synthetic peptide
YIVPSGGFTSYADSVKG

SEQ ID NO: 4233 - protein, 15 aa, Artificial Sequence
  Description of Artificial Sequence: Synthetic peptide
DRAYGDYVGWNGFDY

SEQ ID NO: 4234 - protein, 11 aa, Artificial Sequence
  Description of Artificial Sequence: Synthetic peptide
RASQSISSFLA

SEQ ID NO: 4235 - protein, 7 aa, Artificial Sequence
  Description of Artificial Sequence: Synthetic peptide
DASYRAT

SEQ ID NO: 4236 - protein, 9 aa, Artificial Sequence
  Description of Artificial Sequence: Synthetic peptide
QQRGNWPIT

SEQ ID NO: 4237 - protein, 5 aa, Artificial Sequence
  Description of Artificial Sequence: Synthetic peptide
RYHMW

SEQ ID NO: 4238 - protein, 17 aa, Artificial Sequence
  Description of Artificial Sequence: Synthetic peptide
YISPSGGSTLYADSVKG

SEQ ID NO: 4239 - protein, 15 aa, Artificial Sequence
  Description of Artificial Sequence: Synthetic peptide
DRAYGDYVGWNGFDY

SEQ ID NO: 4240 - protein, 11 aa, Artificial Sequence
  Description of Artificial Sequence: Synthetic peptide
RASQSISSFLA

SEQ ID NO: 4241 - protein, 7 aa, Artificial Sequence
  Description of Artificial Sequence: Synthetic peptide
DASYRAT

SEQ ID NO: 4242 - protein, 9 aa, Artificial Sequence
  Description of Artificial Sequence: Synthetic peptide
QQRGNWPIT

SEQ ID NO: 4243 - protein, 5 aa, Artificial Sequence
  Description of Artificial Sequence: Synthetic peptide
RYMMI

SEQ ID NO: 4244 - protein, 17 aa, Artificial Sequence
  Description of Artificial Sequence: Synthetic peptide
GIYPSGGWTDYADSVKG

SEQ ID NO: 4245 - protein, 15 aa, Artificial Sequence
  Description of Artificial Sequence: Synthetic peptide
DRAYGDYVGWNGFDY

SEQ ID NO: 4246 - protein, 11 aa, Artificial Sequence
  Description of Artificial Sequence: Synthetic peptide
RASQSISSFLA

SEQ ID NO: 4247 - protein, 7 aa, Artificial Sequence
  Description of Artificial Sequence: Synthetic peptide
DASYRAT

SEQ ID NO: 4248 - protein, 9 aa, Artificial Sequence
  Description of Artificial Sequence: Synthetic peptide
QQRGNWPIT

SEQ ID NO: 4249 - protein, 5 aa, Artificial Sequence
  Description of Artificial Sequence: Synthetic peptide
RYNMW

SEQ ID NO: 4250 - protein, 17 aa, Artificial Sequence
  Description of Artificial Sequence: Synthetic peptide
VIYPSGGATYYADSVKG

SEQ ID NO: 4251 - protein, 15 aa, Artificial Sequence
  Description of Artificial Sequence: Synthetic peptide
DRAYGDYVGWNGFDY

SEQ ID NO: 4252 - protein, 11 aa, Artificial Sequence
  Description of Artificial Sequence: Synthetic peptide
RASQSISSFLA

SEQ ID NO: 4253 - protein, 7 aa, Artificial Sequence
  Description of Artificial Sequence: Synthetic peptide
DASYRAT

SEQ ID NO: 4254 - protein, 9 aa, Artificial Sequence
  Description of Artificial Sequence: Synthetic peptide
QQRGNWPIT

SEQ ID NO: 4255 - protein, 5 aa, Artificial Sequence
  Description of Artificial Sequence: Synthetic peptide
RYPMF

SEQ ID NO: 4256 - protein, 17 aa, Artificial Sequence
  Description of Artificial Sequence: Synthetic peptide
YISPSGGYTSYADSVKG

SEQ ID NO: 4257 - protein, 15 aa, Artificial Sequence
  Description of Artificial Sequence: Synthetic peptide
DRAYGDYVGWNGFDY

SEQ ID NO: 4258 - protein, 11 aa, Artificial Sequence
  Description of Artificial Sequence: Synthetic peptide
RASQSISSFLA

SEQ ID NO: 4259 - protein, 7 aa, Artificial Sequence
  Description of Artificial Sequence: Synthetic peptide
DASYRAT

SEQ ID NO: 4260 - protein, 9 aa, Artificial Sequence
  Description of Artificial Sequence: Synthetic peptide
QQRGNWPIT

SEQ ID NO: 4261 - protein, 5 aa, Artificial Sequence
  Description of Artificial Sequence: Synthetic peptide
RYPMF

SEQ ID NO: 4262 - protein, 17 aa, Artificial Sequence
  Description of Artificial Sequence: Synthetic peptide
YIVPSGGYTDYADSVKG

SEQ ID NO: 4263 - protein, 15 aa, Artificial Sequence
  Description of Artificial Sequence: Synthetic peptide
DRAYGDYVGWNGFDY

SEQ ID NO: 4264 - protein, 11 aa, Artificial Sequence
  Description of Artificial Sequence: Synthetic peptide
RASQSISSFLA

SEQ ID NO: 4265 - protein, 7 aa, Artificial Sequence
  Description of Artificial Sequence: Synthetic peptide
DASYRAT

SEQ ID NO: 4266 - protein, 9 aa, Artificial Sequence
  Description of Artificial Sequence: Synthetic peptide
QQRGNWPIT

SEQ ID NO: 4267 - protein, 5 aa, Artificial Sequence
  Description of Artificial Sequence: Synthetic peptide
RYPMI

SEQ ID NO: 4268 - protein, 17 aa, Artificial Sequence
  Description of Artificial Sequence: Synthetic peptide
YIYPSGGGTYYADSVKG

SEQ ID NO: 4269 - protein, 15 aa, Artificial Sequence
  Description of Artificial Sequence: Synthetic peptide
DRAYGDYVGWNGFDY

SEQ ID NO: 4270 - protein, 11 aa, Artificial Sequence
  Description of Artificial Sequence: Synthetic peptide
RASQSISSFLA

SEQ ID NO: 4271 - protein, 7 aa, Artificial Sequence
  Description of Artificial Sequence: Synthetic peptide
DASYRAT

SEQ ID NO: 4272 - protein, 9 aa, Artificial Sequence
  Description of Artificial Sequence: Synthetic peptide
QQRGNWPIT

SEQ ID NO: 4273 - protein, 5 aa, Artificial Sequence
  Description of Artificial Sequence: Synthetic peptide
RYPMV

SEQ ID NO: 4274 - protein, 17 aa, Artificial Sequence
  Description of Artificial Sequence: Synthetic peptide
YISPSGGYTGYADSVKG

SEQ ID NO: 4275 - protein, 15 aa, Artificial Sequence
  Description of Artificial Sequence: Synthetic peptide
DRAYGDYVGWNGFDY

SEQ ID NO: 4276 - protein, 11 aa, Artificial Sequence
  Description of Artificial Sequence: Synthetic peptide
RASQSISSFLA

SEQ ID NO: 4277 - protein, 7 aa, Artificial Sequence
  Description of Artificial Sequence: Synthetic peptide
DASYRAT

SEQ ID NO: 4278 - protein, 9 aa, Artificial Sequence
  Description of Artificial Sequence: Synthetic peptide
QQRGNWPIT

SEQ ID NO: 4279 - protein, 5 aa, Artificial Sequence
  Description of Artificial Sequence: Synthetic peptide
RYPMW

SEQ ID NO: 4280 - protein, 17 aa, Artificial Sequence
  Description of Artificial Sequence: Synthetic peptide
SISSSGGGTYYADSVKG

SEQ ID NO: 4281 - protein, 15 aa, Artificial Sequence
  Description of Artificial Sequence: Synthetic peptide
DRAYGDYVGWNGFDY

SEQ ID NO: 4282 - protein, 11 aa, Artificial Sequence
  Description of Artificial Sequence: Synthetic peptide
RASQSISSFLA

SEQ ID NO: 4283 - protein, 7 aa, Artificial Sequence
  Description of Artificial Sequence: Synthetic peptide
DASYRAT

SEQ ID NO: 4284 - protein, 9 aa, Artificial Sequence
  Description of Artificial Sequence: Synthetic peptide
QQRGNWPIT

SEQ ID NO: 4285 - protein, 5 aa, Artificial Sequence
  Description of Artificial Sequence: Synthetic peptide
RYPMW

SEQ ID NO: 4286 - protein, 17 aa, Artificial Sequence
  Description of Artificial Sequence: Synthetic peptide
SIYPSGGATFYADSVKG

SEQ ID NO: 4287 - protein, 15 aa, Artificial Sequence
  Description of Artificial Sequence: Synthetic peptide
DRAYGDYVGWNGFDY

SEQ ID NO: 4288 - protein, 11 aa, Artificial Sequence
  Description of Artificial Sequence: Synthetic peptide
RASQSISSFLA

SEQ ID NO: 4289 - protein, 7 aa, Artificial Sequence
  Description of Artificial Sequence: Synthetic peptide
DASYRAT

SEQ ID NO: 4290 - protein, 9 aa, Artificial Sequence
  Description of Artificial Sequence: Synthetic peptide
QQRGNWPIT

SEQ ID NO: 4291 - protein, 5 aa, Artificial Sequence
  Description of Artificial Sequence: Synthetic peptide
RYPMW

SEQ ID NO: 4292 - protein, 17 aa, Artificial Sequence
  Description of Artificial Sequence: Synthetic peptide
VIYPSGGATYYADSVKG

SEQ ID NO: 4293 - protein, 15 aa, Artificial Sequence
  Description of Artificial Sequence: Synthetic peptide
DRAYGDYVGWNGFDY

SEQ ID NO: 4294 - protein, 11 aa, Artificial Sequence
  Description of Artificial Sequence: Synthetic peptide
RASQSISSFLA

SEQ ID NO: 4295 - protein, 7 aa, Artificial Sequence
  Description of Artificial Sequence: Synthetic peptide
DASYRAT

SEQ ID NO: 4296 - protein, 9 aa, Artificial Sequence
  Description of Artificial Sequence: Synthetic peptide
QQRGNWPIT

SEQ ID NO: 4297 - protein, 5 aa, Artificial Sequence
  Description of Artificial Sequence: Synthetic peptide
RYPMW

SEQ ID NO: 4298 - protein, 17 aa, Artificial Sequence
  Description of Artificial Sequence: Synthetic peptide
VIYPSGGTTFYADSVKG

SEQ ID NO: 4299 - protein, 15 aa, Artificial Sequence
  Description of Artificial Sequence: Synthetic peptide
DRAYGDYVGWNGFDY

SEQ ID NO: 4300 - protein, 11 aa, Artificial Sequence
  Description of Artificial Sequence: Synthetic peptide
RASQSISSFLA

SEQ ID NO: 4301 - protein, 7 aa, Artificial Sequence
  Description of Artificial Sequence: Synthetic peptide
DASYRAT

SEQ ID NO: 4302 - protein, 9 aa, Artificial Sequence
  Description of Artificial Sequence: Synthetic peptide
QQRGNWPIT

SEQ ID NO: 4303 - protein, 5 aa, Artificial Sequence
  Description of Artificial Sequence: Synthetic peptide
RYPMW

SEQ ID NO: 4304 - protein, 17 aa, Artificial Sequence
  Description of Artificial Sequence: Synthetic peptide
VIYSSGGYTGYADSVKG

SEQ ID NO: 4305 - protein, 15 aa, Artificial Sequence
  Description of Artificial Sequence: Synthetic peptide
DRAYGDYVGWNGFDY

SEQ ID NO: 4306 - protein, 11 aa, Artificial Sequence
  Description of Artificial Sequence: Synthetic peptide
RASQSISSFLA

SEQ ID NO: 4307 - protein, 7 aa, Artificial Sequence
  Description of Artificial Sequence: Synthetic peptide
DASYRAT

SEQ ID NO: 4308 - protein, 9 aa, Artificial Sequence
  Description of Artificial Sequence: Synthetic peptide
QQRGNWPIT

SEQ ID NO: 4309 - protein, 5 aa, Artificial Sequence
  Description of Artificial Sequence: Synthetic peptide
RYPMW

SEQ ID NO: 4310 - protein, 17 aa, Artificial Sequence
  Description of Artificial Sequence: Synthetic peptide
YIGSSGGGTFYADSVKG

SEQ ID NO: 4311 - protein, 15 aa, Artificial Sequence
  Description of Artificial Sequence: Synthetic peptide
DRAYGDYVGWNGFDY

SEQ ID NO: 4312 - protein, 11 aa, Artificial Sequence
  Description of Artificial Sequence: Synthetic peptide
RASQSISSFLA

SEQ ID NO: 4313 - protein, 7 aa, Artificial Sequence
  Description of Artificial Sequence: Synthetic peptide
DASYRAT

SEQ ID NO: 4314 - protein, 9 aa, Artificial Sequence
  Description of Artificial Sequence: Synthetic peptide
QQRGNWPIT

SEQ ID NO: 4315 - protein, 5 aa, Artificial Sequence
  Description of Artificial Sequence: Synthetic peptide
RYPMW

SEQ ID NO: 4316 - protein, 17 aa, Artificial Sequence
  Description of Artificial Sequence: Synthetic peptide
YISPSGGGTLYADSVKG

SEQ ID NO: 4317 - protein, 15 aa, Artificial Sequence
  Description of Artificial Sequence: Synthetic peptide
DRAYGDYVGWNGFDY

SEQ ID NO: 4318 - protein, 11 aa, Artificial Sequence
  Description of Artificial Sequence: Synthetic peptide
RASQSISSFLA

SEQ ID NO: 4319 - protein, 7 aa, Artificial Sequence
  Description of Artificial Sequence: Synthetic peptide
DASYRAT

SEQ ID NO: 4320 - protein, 9 aa, Artificial Sequence
  Description of Artificial Sequence: Synthetic peptide
QQRGNWPIT

SEQ ID NO: 4321 - protein, 5 aa, Artificial Sequence
  Description of Artificial Sequence: Synthetic peptide
RYPMW

SEQ ID NO: 4322 - protein, 17 aa, Artificial Sequence
  Description of Artificial Sequence: Synthetic peptide
YISPSGGMTSYADSVKG

SEQ ID NO: 4323 - protein, 15 aa, Artificial Sequence
  Description of Artificial Sequence: Synthetic peptide
DRAYGDYVGWNGFDY

SEQ ID NO: 4324 - protein, 11 aa, Artificial Sequence
  Description of Artificial Sequence: Synthetic peptide
RASQSISSFLA

SEQ ID NO: 4325 - protein, 7 aa, Artificial Sequence
  Description of Artificial Sequence: Synthetic peptide
DASYRAT

SEQ ID NO: 4326 - protein, 9 aa, Artificial Sequence
  Description of Artificial Sequence: Synthetic peptide
QQRGNWPIT

SEQ ID NO: 4327 - protein, 5 aa, Artificial Sequence
  Description of Artificial Sequence: Synthetic peptide
RYPMW

SEQ ID NO: 4328 - protein, 17 aa, Artificial Sequence
  Description of Artificial Sequence: Synthetic peptide
YISSSGGGTFYADSVKG

SEQ ID NO: 4329 - protein, 15 aa, Artificial Sequence
  Description of Artificial Sequence: Synthetic peptide
DRAYGDYVGWNGFDY

SEQ ID NO: 4330 - protein, 11 aa, Artificial Sequence
  Description of Artificial Sequence: Synthetic peptide
RASQSISSFLA

SEQ ID NO: 4331 - protein, 7 aa, Artificial Sequence
  Description of Artificial Sequence: Synthetic peptide
DASYRAT

SEQ ID NO: 4332 - protein, 9 aa, Artificial Sequence
  Description of Artificial Sequence: Synthetic peptide
QQRGNWPIT

SEQ ID NO: 4333 - protein, 5 aa, Artificial Sequence
  Description of Artificial Sequence: Synthetic peptide
RYPMW

SEQ ID NO: 4334 - protein, 17 aa, Artificial Sequence
  Description of Artificial Sequence: Synthetic peptide
YISSSGGGTLYADSVKG

SEQ ID NO: 4335 - protein, 15 aa, Artificial Sequence
  Description of Artificial Sequence: Synthetic peptide
DRAYGDYVGWNGFDY

SEQ ID NO: 4336 - protein, 11 aa, Artificial Sequence
  Description of Artificial Sequence: Synthetic peptide
RASQSISSFLA

SEQ ID NO: 4337 - protein, 7 aa, Artificial Sequence
  Description of Artificial Sequence: Synthetic peptide
DASYRAT

SEQ ID NO: 4338 - protein, 9 aa, Artificial Sequence
  Description of Artificial Sequence: Synthetic peptide
QQRGNWPIT

SEQ ID NO: 4339 - protein, 5 aa, Artificial Sequence
  Description of Artificial Sequence: Synthetic peptide
RYPMW

SEQ ID NO: 4340 - protein, 17 aa, Artificial Sequence
  Description of Artificial Sequence: Synthetic peptide
YIVPSGGATYYADSVKG

SEQ ID NO: 4341 - protein, 15 aa, Artificial Sequence
  Description of Artificial Sequence: Synthetic peptide
DRAYGDYVGWNGFDY

SEQ ID NO: 4342 - protein, 11 aa, Artificial Sequence
  Description of Artificial Sequence: Synthetic peptide
RASQSISSFLA

SEQ ID NO: 4343 - protein, 7 aa, Artificial Sequence
  Description of Artificial Sequence: Synthetic peptide
DASYRAT

SEQ ID NO: 4344 - protein, 9 aa, Artificial Sequence
  Description of Artificial Sequence: Synthetic peptide
QQRGNWPIT

SEQ ID NO: 4345 - protein, 5 aa, Artificial Sequence
  Description of Artificial Sequence: Synthetic peptide
RYPMW

SEQ ID NO: 4346 - protein, 17 aa, Artificial Sequence
  Description of Artificial Sequence: Synthetic peptide
YIVPSGGFTDYAHSVKG

SEQ ID NO: 4347 - protein, 15 aa, Artificial Sequence
  Description of Artificial Sequence: Synthetic peptide
DRAYGDYVGWNGFDY

SEQ ID NO: 4348 - protein, 11 aa, Artificial Sequence
  Description of Artificial Sequence: Synthetic peptide
RASQSISSFLA

SEQ ID NO: 4349 - protein, 7 aa, Artificial Sequence
  Description of Artificial Sequence: Synthetic peptide
DASYRAT

SEQ ID NO: 4350 - protein, 9 aa, Artificial Sequence
  Description of Artificial Sequence: Synthetic peptide
QQRGNWPIT

SEQ ID NO: 4351 - protein, 5 aa, Artificial Sequence
  Description of Artificial Sequence: Synthetic peptide
RYPMW

SEQ ID NO: 4352 - protein, 17 aa, Artificial Sequence
  Description of Artificial Sequence: Synthetic peptide
YIVPSGGTTYYADSVKG

SEQ ID NO: 4353 - protein, 15 aa, Artificial Sequence
  Description of Artificial Sequence: Synthetic peptide
DRAYGDYVGWNGFDY

SEQ ID NO: 4354 - protein, 11 aa, Artificial Sequence
  Description of Artificial Sequence: Synthetic peptide
RASQSISSFLA

SEQ ID NO: 4355 - protein, 7 aa, Artificial Sequence
  Description of Artificial Sequence: Synthetic peptide
DASYRAT

SEQ ID NO: 4356 - protein, 9 aa, Artificial Sequence
  Description of Artificial Sequence: Synthetic peptide
QQRGNWPIT

SEQ ID NO: 4357 - protein, 5 aa, Artificial Sequence
  Description of Artificial Sequence: Synthetic peptide
RYPMW

SEQ ID NO: 4358 - protein, 17 aa, Artificial Sequence
  Description of Artificial Sequence: Synthetic peptide
YIYPSGGATFYADSVKG

SEQ ID NO: 4359 - protein, 15 aa, Artificial Sequence
  Description of Artificial Sequence: Synthetic peptide
DRAYGDYVGWNGFDY

SEQ ID NO: 4360 - protein, 11 aa, Artificial Sequence
  Description of Artificial Sequence: Synthetic peptide
RASQSISSFLA

SEQ ID NO: 4361 - protein, 7 aa, Artificial Sequence
  Description of Artificial Sequence: Synthetic peptide
DASYRAT

SEQ ID NO: 4362 - protein, 9 aa, Artificial Sequence
  Description of Artificial Sequence: Synthetic peptide
QQRGNWPIT

SEQ ID NO: 4363 - protein, 5 aa, Artificial Sequence
  Description of Artificial Sequence: Synthetic peptide
RYPMW

SEQ ID NO: 4364 - protein, 17 aa, Artificial Sequence
  Description of Artificial Sequence: Synthetic peptide
YIYSSGGKTFYADSVKG

SEQ ID NO: 4365 - protein, 15 aa, Artificial Sequence
  Description of Artificial Sequence: Synthetic peptide
DRAYGDYVGWNGFDY

SEQ ID NO: 4366 - protein, 11 aa, Artificial Sequence
  Description of Artificial Sequence: Synthetic peptide
RASQSISSFLA

SEQ ID NO: 4367 - protein, 7 aa, Artificial Sequence
  Description of Artificial Sequence: Synthetic peptide
DASYRAT

SEQ ID NO: 4368 - protein, 9 aa, Artificial Sequence
  Description of Artificial Sequence: Synthetic peptide
QQRGNWPIT

SEQ ID NO: 4369 - protein, 5 aa, Artificial Sequence
  Description of Artificial Sequence: Synthetic peptide
RYSMW

SEQ ID NO: 4370 - protein, 17 aa, Artificial Sequence
  Description of Artificial Sequence: Synthetic peptide
SIYPSGGATFYADSVKG

SEQ ID NO: 4371 - protein, 15 aa, Artificial Sequence
  Description of Artificial Sequence: Synthetic peptide
DRAYGDYVGWNGFDY

SEQ ID NO: 4372 - protein, 11 aa, Artificial Sequence
  Description of Artificial Sequence: Synthetic peptide
RASQSISSFLA

SEQ ID NO: 4373 - protein, 7 aa, Artificial Sequence
  Description of Artificial Sequence: Synthetic peptide
DASYRAT

SEQ ID NO: 4374 - protein, 9 aa, Artificial Sequence
  Description of Artificial Sequence: Synthetic peptide
QQRGNWPIT

SEQ ID NO: 4375 - protein, 5 aa, Artificial Sequence
  Description of Artificial Sequence: Synthetic peptide
RYSMW

SEQ ID NO: 4376 - protein, 17 aa, Artificial Sequence
  Description of Artificial Sequence: Synthetic peptide
VIYPSGGYTGYADSVKG

SEQ ID NO: 4377 - protein, 15 aa, Artificial Sequence
  Description of Artificial Sequence: Synthetic peptide
DRAYGDYVGWNGFDY

SEQ ID NO: 4378 - protein, 11 aa, Artificial Sequence
  Description of Artificial Sequence: Synthetic peptide
RASQSISSFLA

SEQ ID NO: 4379 - protein, 7 aa, Artificial Sequence
  Description of Artificial Sequence: Synthetic peptide
DASYRAT

SEQ ID NO: 4380 - protein, 9 aa, Artificial Sequence
  Description of Artificial Sequence: Synthetic peptide
QQRGNWPIT

SEQ ID NO: 4381 - protein, 5 aa, Artificial Sequence
  Description of Artificial Sequence: Synthetic peptide
RYWMW

SEQ ID NO: 4382 - protein, 17 aa, Artificial Sequence
  Description of Artificial Sequence: Synthetic peptide
VIVPSGGATFYADSVKG

SEQ ID NO: 4383 - protein, 15 aa, Artificial Sequence
  Description of Artificial Sequence: Synthetic peptide
DRAYGDYVGWNGFDY

SEQ ID NO: 4384 - protein, 11 aa, Artificial Sequence
  Description of Artificial Sequence: Synthetic peptide
RASQSISSFLA

SEQ ID NO: 4385 - protein, 7 aa, Artificial Sequence
  Description of Artificial Sequence: Synthetic peptide
DASYRAT

SEQ ID NO: 4386 - protein, 9 aa, Artificial Sequence
  Description of Artificial Sequence: Synthetic peptide
QQRGNWPIT

SEQ ID NO: 4387 - protein, 5 aa, Artificial Sequence
  Description of Artificial Sequence: Synthetic peptide
RYYMM

SEQ ID NO: 4388 - protein, 17 aa, Artificial Sequence
  Description of Artificial Sequence: Synthetic peptide
YISPSGGATYYADSVKG

SEQ ID NO: 4389 - protein, 15 aa, Artificial Sequence
  Description of Artificial Sequence: Synthetic peptide
DRAYGDYVGWNGFDY

SEQ ID NO: 4390 - protein, 11 aa, Artificial Sequence
  Description of Artificial Sequence: Synthetic peptide
RASQSISSFLA

SEQ ID NO: 4391 - protein, 7 aa, Artificial Sequence
  Description of Artificial Sequence: Synthetic peptide
DASYRAT

SEQ ID NO: 4392 - protein, 9 aa, Artificial Sequence
  Description of Artificial Sequence: Synthetic peptide
QQRGNWPIT

SEQ ID NO: 4393 - protein, 5 aa, Artificial Sequence
  Description of Artificial Sequence: Synthetic peptide
SYDMI

SEQ ID NO: 4394 - protein, 17 aa, Artificial Sequence
  Description of Artificial Sequence: Synthetic peptide
WIGPSGGSTMYADSVKG

SEQ ID NO: 4395 - protein, 15 aa, Artificial Sequence
  Description of Artificial Sequence: Synthetic peptide
DRAYGDYVGWNGFDY

SEQ ID NO: 4396 - protein, 11 aa, Artificial Sequence
  Description of Artificial Sequence: Synthetic peptide
RASQSISSFLA

SEQ ID NO: 4397 - protein, 7 aa, Artificial Sequence
  Description of Artificial Sequence: Synthetic peptide
DASYRAT

SEQ ID NO: 4398 - protein, 9 aa, Artificial Sequence
  Description of Artificial Sequence: Synthetic peptide
QQRGNWPIT

SEQ ID NO: 4399 - protein, 5 aa, Artificial Sequence
  Description of Artificial Sequence: Synthetic peptide
SYDMW

SEQ ID NO: 4400 - protein, 17 aa, Artificial Sequence
  Description of Artificial Sequence: Synthetic peptide
SISSSVGATYYADSVKG

SEQ ID NO: 4401 - protein, 15 aa, Artificial Sequence
  Description of Artificial Sequence: Synthetic peptide
DRAYGDYVGWNGFDY

SEQ ID NO: 4402 - protein, 11 aa, Artificial Sequence
  Description of Artificial Sequence: Synthetic peptide
RASQSISSFLA

SEQ ID NO: 4403 - protein, 7 aa, Artificial Sequence
  Description of Artificial Sequence: Synthetic peptide
DASYRAT

SEQ ID NO: 4404 - protein, 9 aa, Artificial Sequence
  Description of Artificial Sequence: Synthetic peptide
QQRGNWPIT

SEQ ID NO: 4405 - protein, 5 aa, Artificial Sequence
  Description of Artificial Sequence: Synthetic peptide
SYDMW

SEQ ID NO: 4406 - protein, 17 aa, Artificial Sequence
  Description of Artificial Sequence: Synthetic peptide
VIGPSGGGTFYADSVKG

SEQ ID NO: 4407 - protein, 15 aa, Artificial Sequence
  Description of Artificial Sequence: Synthetic peptide
DRAYGDYVGWNGFDY

SEQ ID NO: 4408 - protein, 11 aa, Artificial Sequence
  Description of Artificial Sequence: Synthetic peptide
RASQSISSFLA

SEQ ID NO: 4409 - protein, 7 aa, Artificial Sequence
  Description of Artificial Sequence: Synthetic peptide
DASYRAT

SEQ ID NO: 4410 - protein, 9 aa, Artificial Sequence
  Description of Artificial Sequence: Synthetic peptide
QQRGNWPIT

SEQ ID NO: 4411 - protein, 5 aa, Artificial Sequence
  Description of Artificial Sequence: Synthetic peptide
SYDMW

SEQ ID NO: 4412 - protein, 17 aa, Artificial Sequence
  Description of Artificial Sequence: Synthetic peptide
VISPSGGYTGYADSVKG

SEQ ID NO: 4413 - protein, 15 aa, Artificial Sequence
  Description of Artificial Sequence: Synthetic peptide
DRAYGDYVGWNGFDY

SEQ ID NO: 4414 - protein, 11 aa, Artificial Sequence
  Description of Artificial Sequence: Synthetic peptide
RASQSISSFLA

SEQ ID NO: 4415 - protein, 7 aa, Artificial Sequence
  Description of Artificial Sequence: Synthetic peptide
DASYRAT

SEQ ID NO: 4416 - protein, 9 aa, Artificial Sequence
  Description of Artificial Sequence: Synthetic peptide
QQRGNWPIT

SEQ ID NO: 4417 - protein, 5 aa, Artificial Sequence
  Description of Artificial Sequence: Synthetic peptide
SYDMW

SEQ ID NO: 4418 - protein, 17 aa, Artificial Sequence
  Description of Artificial Sequence: Synthetic peptide
VIYPSGGRTYYADSVKG

SEQ ID NO: 4419 - protein, 15 aa, Artificial Sequence
  Description of Artificial Sequence: Synthetic peptide
DRAYGDYVGWNGFDY

SEQ ID NO: 4420 - protein, 11 aa, Artificial Sequence
  Description of Artificial Sequence: Synthetic peptide
RASQSISSFLA

SEQ ID NO: 4421 - protein, 7 aa, Artificial Sequence
  Description of Artificial Sequence: Synthetic peptide
DASYRAT

SEQ ID NO: 4422 - protein, 9 aa, Artificial Sequence
  Description of Artificial Sequence: Synthetic peptide
QQRGNWPIT

SEQ ID NO: 4423 - protein, 5 aa, Artificial Sequence
  Description of Artificial Sequence: Synthetic peptide
SYDMW

SEQ ID NO: 4424 - protein, 17 aa, Artificial Sequence
  Description of Artificial Sequence: Synthetic peptide
VIYSSGGFTGYADSVKG

SEQ ID NO: 4425 - protein, 15 aa, Artificial Sequence
  Description of Artificial Sequence: Synthetic peptide
DRAYGDYVGWNGFDY

SEQ ID NO: 4426 - protein, 11 aa, Artificial Sequence
  Description of Artificial Sequence: Synthetic peptide
RASQSISSFLA

SEQ ID NO: 4427 - protein, 7 aa, Artificial Sequence
  Description of Artificial Sequence: Synthetic peptide
DASYRAT

SEQ ID NO: 4428 - protein, 9 aa, Artificial Sequence
  Description of Artificial Sequence: Synthetic peptide
QQRGNWPIT

SEQ ID NO: 4429 - protein, 5 aa, Artificial Sequence
  Description of Artificial Sequence: Synthetic peptide
SYDMW

SEQ ID NO: 4430 - protein, 17 aa, Artificial Sequence
  Description of Artificial Sequence: Synthetic peptide
VIYSSGGTTFYADSVKG

SEQ ID NO: 4431 - protein, 15 aa, Artificial Sequence
  Description of Artificial Sequence: Synthetic peptide
DRAYGDYVGWNGFDY

SEQ ID NO: 4432 - protein, 11 aa, Artificial Sequence
  Description of Artificial Sequence: Synthetic peptide
RASQSISSFLA

SEQ ID NO: 4433 - protein, 7 aa, Artificial Sequence
  Description of Artificial Sequence: Synthetic peptide
DASYRAT

SEQ ID NO: 4434 - protein, 9 aa, Artificial Sequence
  Description of Artificial Sequence: Synthetic peptide
QQRGNWPIT

SEQ ID NO: 4435 - protein, 5 aa, Artificial Sequence
  Description of Artificial Sequence: Synthetic peptide
SYDMW

SEQ ID NO: 4436 - protein, 17 aa, Artificial Sequence
  Description of Artificial Sequence: Synthetic peptide
VIYSSGGYTGYADSVKG

SEQ ID NO: 4437 - protein, 15 aa, Artificial Sequence
  Description of Artificial Sequence: Synthetic peptide
DRAYGDYVGWNGFDY

SEQ ID NO: 4438 - protein, 11 aa, Artificial Sequence
  Description of Artificial Sequence: Synthetic peptide
RASQSISSFLA

SEQ ID NO: 4439 - protein, 7 aa, Artificial Sequence
  Description of Artificial Sequence: Synthetic peptide
DASYRAT

SEQ ID NO: 4440 - protein, 9 aa, Artificial Sequence
  Description of Artificial Sequence: Synthetic peptide
QQRGNWPIT

SEQ ID NO: 4441 - protein, 5 aa, Artificial Sequence
  Description of Artificial Sequence: Synthetic peptide
SYEMW

SEQ ID NO: 4442 - protein, 17 aa, Artificial Sequence
  Description of Artificial Sequence: Synthetic peptide
VIYSSGGATFYADSVKG

SEQ ID NO: 4443 - protein, 15 aa, Artificial Sequence
  Description of Artificial Sequence: Synthetic peptide
DRAYGDYVGWNGFDY

SEQ ID NO: 4444 - protein, 11 aa, Artificial Sequence
  Description of Artificial Sequence: Synthetic peptide
RASQSISSFLA

SEQ ID NO: 4445 - protein, 7 aa, Artificial Sequence
  Description of Artificial Sequence: Synthetic peptide
DASYRAT

SEQ ID NO: 4446 - protein, 9 aa, Artificial Sequence
  Description of Artificial Sequence: Synthetic peptide
QQRGNWPIT

SEQ ID NO: 4447 - protein, 5 aa, Artificial Sequence
  Description of Artificial Sequence: Synthetic peptide
SYEMW

SEQ ID NO: 4448 - protein, 17 aa, Artificial Sequence
  Description of Artificial Sequence: Synthetic peptide
YISSSGGGTYYADSVKG

SEQ ID NO: 4449 - protein, 15 aa, Artificial Sequence
  Description of Artificial Sequence: Synthetic peptide
DRAYGDYVGWNGFDY

SEQ ID NO: 4450 - protein, 11 aa, Artificial Sequence
  Description of Artificial Sequence: Synthetic peptide
RASQSISSFLA

SEQ ID NO: 4451 - protein, 7 aa, Artificial Sequence
  Description of Artificial Sequence: Synthetic peptide
DASYRAT

SEQ ID NO: 4452 - protein, 9 aa, Artificial Sequence
  Description of Artificial Sequence: Synthetic peptide
QQRGNWPIT

SEQ ID NO: 4453 - protein, 5 aa, Artificial Sequence
  Description of Artificial Sequence: Synthetic peptide
SYMMI

SEQ ID NO: 4454 - protein, 17 aa, Artificial Sequence
  Description of Artificial Sequence: Synthetic peptide
SISPSGGGTYYADSVKG

SEQ ID NO: 4455 - protein, 15 aa, Artificial Sequence
  Description of Artificial Sequence: Synthetic peptide
DRAYGDYVGWNGFDY

SEQ ID NO: 4456 - protein, 11 aa, Artificial Sequence
  Description of Artificial Sequence: Synthetic peptide
RASQSISSFLA

SEQ ID NO: 4457 - protein, 7 aa, Artificial Sequence
  Description of Artificial Sequence: Synthetic peptide
DASYRAT

SEQ ID NO: 4458 - protein, 9 aa, Artificial Sequence
  Description of Artificial Sequence: Synthetic peptide
QQRGNWPIT

SEQ ID NO: 4459 - protein, 5 aa, Artificial Sequence
  Description of Artificial Sequence: Synthetic peptide
SYMMI

SEQ ID NO: 4460 - protein, 17 aa, Artificial Sequence
  Description of Artificial Sequence: Synthetic peptide
SISPSGGWTSYADSVKG

SEQ ID NO: 4461 - protein, 15 aa, Artificial Sequence
  Description of Artificial Sequence: Synthetic peptide
DRAYGDYVGWNGFDY

SEQ ID NO: 4462 - protein, 11 aa, Artificial Sequence
  Description of Artificial Sequence: Synthetic peptide
RASQSISSFLA

SEQ ID NO: 4463 - protein, 7 aa, Artificial Sequence
  Description of Artificial Sequence: Synthetic peptide
DASYRAT

SEQ ID NO: 4464 - protein, 9 aa, Artificial Sequence
  Description of Artificial Sequence: Synthetic peptide
QQRGNWPIT

SEQ ID NO: 4465 - protein, 5 aa, Artificial Sequence
  Description of Artificial Sequence: Synthetic peptide
SYMMI

SEQ ID NO: 4466 - protein, 17 aa, Artificial Sequence
  Description of Artificial Sequence: Synthetic peptide
SIYPSGGYTSYADSVKG

SEQ ID NO: 4467 - protein, 15 aa, Artificial Sequence
  Description of Artificial Sequence: Synthetic peptide
DRAYGDYVGWNGFDY

SEQ ID NO: 4468 - protein, 11 aa, Artificial Sequence
  Description of Artificial Sequence: Synthetic peptide
RASQSISSFLA

SEQ ID NO: 4469 - protein, 7 aa, Artificial Sequence
  Description of Artificial Sequence: Synthetic peptide
DASYRAT

SEQ ID NO: 4470 - protein, 9 aa, Artificial Sequence
  Description of Artificial Sequence: Synthetic peptide
QQRGNWPIT

SEQ ID NO: 4471 - protein, 5 aa, Artificial Sequence
  Description of Artificial Sequence: Synthetic peptide
SYNMW

SEQ ID NO: 4472 - protein, 17 aa, Artificial Sequence
  Description of Artificial Sequence: Synthetic peptide
SISPSGGGTYYADSVKG

SEQ ID NO: 4473 - protein, 15 aa, Artificial Sequence
  Description of Artificial Sequence: Synthetic peptide
DRAYGDYVGWNGFDY

SEQ ID NO: 4474 - protein, 11 aa, Artificial Sequence
  Description of Artificial Sequence: Synthetic peptide
RASQSISSFLA

SEQ ID NO: 4475 - protein, 7 aa, Artificial Sequence
  Description of Artificial Sequence: Synthetic peptide
DASYRAT

SEQ ID NO: 4476 - protein, 9 aa, Artificial Sequence
  Description of Artificial Sequence: Synthetic peptide
QQRGNWPIT

SEQ ID NO: 4477 - protein, 5 aa, Artificial Sequence
  Description of Artificial Sequence: Synthetic peptide
SYPMI

SEQ ID NO: 4478 - protein, 17 aa, Artificial Sequence
  Description of Artificial Sequence: Synthetic peptide
YISSSGGFTDYADSVKG

SEQ ID NO: 4479 - protein, 15 aa, Artificial Sequence
  Description of Artificial Sequence: Synthetic peptide
DRAYGDYVGWNGFDY

SEQ ID NO: 4480 - protein, 11 aa, Artificial Sequence
  Description of Artificial Sequence: Synthetic peptide
RASQSISSFLA

SEQ ID NO: 4481 - protein, 7 aa, Artificial Sequence
  Description of Artificial Sequence: Synthetic peptide
DASYRAT

SEQ ID NO: 4482 - protein, 9 aa, Artificial Sequence
  Description of Artificial Sequence: Synthetic peptide
QQRGNWPIT

SEQ ID NO: 4483 - protein, 5 aa, Artificial Sequence
  Description of Artificial Sequence: Synthetic peptide
SYPMM

SEQ ID NO: 4484 - protein, 17 aa, Artificial Sequence
  Description of Artificial Sequence: Synthetic peptide
YIYSSGGGTFYADSVKG

SEQ ID NO: 4485 - protein, 15 aa, Artificial Sequence
  Description of Artificial Sequence: Synthetic peptide
DRAYGDYVGWNGFDY

SEQ ID NO: 4486 - protein, 11 aa, Artificial Sequence
  Description of Artificial Sequence: Synthetic peptide
RASQSISSFLA

SEQ ID NO: 4487 - protein, 7 aa, Artificial Sequence
  Description of Artificial Sequence: Synthetic peptide
DASYRAT

SEQ ID NO: 4488 - protein, 9 aa, Artificial Sequence
  Description of Artificial Sequence: Synthetic peptide
QQRGNWPIT

SEQ ID NO: 4489 - protein, 5 aa, Artificial Sequence
  Description of Artificial Sequence: Synthetic peptide
SYPMW

SEQ ID NO: 4490 - protein, 17 aa, Artificial Sequence
  Description of Artificial Sequence: Synthetic peptide
SISPSGGGTYYADSVKG

SEQ ID NO: 4491 - protein, 15 aa, Artificial Sequence
  Description of Artificial Sequence: Synthetic peptide
DRAYGDYVGWNGFDY

SEQ ID NO: 4492 - protein, 11 aa, Artificial Sequence
  Description of Artificial Sequence: Synthetic peptide
RASQSISSFLA

SEQ ID NO: 4493 - protein, 7 aa, Artificial Sequence
  Description of Artificial Sequence: Synthetic peptide
DASYRAT

SEQ ID NO: 4494 - protein, 9 aa, Artificial Sequence
  Description of Artificial Sequence: Synthetic peptide
QQRGNWPIT

SEQ ID NO: 4495 - protein, 5 aa, Artificial Sequence
  Description of Artificial Sequence: Synthetic peptide
SYPMW

SEQ ID NO: 4496 - protein, 16 aa, Artificial Sequence
  Description of Artificial Sequence: Synthetic peptide
SISPSGMTYYADSVKG

SEQ ID NO: 4497 - protein, 15 aa, Artificial Sequence
  Description of Artificial Sequence: Synthetic peptide
DRAYGDYVGWNGFDY

SEQ ID NO: 4498 - protein, 11 aa, Artificial Sequence
  Description of Artificial Sequence: Synthetic peptide
RASQSISSFLA

SEQ ID NO: 4499 - protein, 7 aa, Artificial Sequence
  Description of Artificial Sequence: Synthetic peptide
DASYRAT

SEQ ID NO: 4500 - protein, 9 aa, Artificial Sequence
  Description of Artificial Sequence: Synthetic peptide
QQRGNWPIT

SEQ ID NO: 4501 - protein, 5 aa, Artificial Sequence
  Description of Artificial Sequence: Synthetic peptide
SYPMW

SEQ ID NO: 4502 - protein, 17 aa, Artificial Sequence
  Description of Artificial Sequence: Synthetic peptide
SIYPSGGGTFYADSVKG

SEQ ID NO: 4503 - protein, 15 aa, Artificial Sequence
  Description of Artificial Sequence: Synthetic peptide
DRAYGDYVGWNGFDY

SEQ ID NO: 4504 - protein, 11 aa, Artificial Sequence
  Description of Artificial Sequence: Synthetic peptide
RASQSISSFLA

SEQ ID NO: 4505 - protein, 7 aa, Artificial Sequence
  Description of Artificial Sequence: Synthetic peptide
DASYRAT

SEQ ID NO: 4506 - protein, 9 aa, Artificial Sequence
  Description of Artificial Sequence: Synthetic peptide
QQRGNWPIT

SEQ ID NO: 4507 - protein, 5 aa, Artificial Sequence
  Description of Artificial Sequence: Synthetic peptide
SYPMW

SEQ ID NO: 4508 - protein, 17 aa, Artificial Sequence
  Description of Artificial Sequence: Synthetic peptide
YISSSGGGTYYADSVKG

SEQ ID NO: 4509 - protein, 15 aa, Artificial Sequence
  Description of Artificial Sequence: Synthetic peptide
DRAYGDYVGWNGFDY

SEQ ID NO: 4510 - protein, 11 aa, Artificial Sequence
  Description of Artificial Sequence: Synthetic peptide
RASQSISSFLA

SEQ ID NO: 4511 - protein, 7 aa, Artificial Sequence
  Description of Artificial Sequence: Synthetic peptide
DASYRAT

SEQ ID NO: 4512 - protein, 9 aa, Artificial Sequence
  Description of Artificial Sequence: Synthetic peptide
QQRGNWPIT

SEQ ID NO: 4513 - protein, 5 aa, Artificial Sequence
  Description of Artificial Sequence: Synthetic peptide
SYPMW

SEQ ID NO: 4514 - protein, 17 aa, Artificial Sequence
  Description of Artificial Sequence: Synthetic peptide
YIVPSGGATFYADSVKG

SEQ ID NO: 4515 - protein, 15 aa, Artificial Sequence
  Description of Artificial Sequence: Synthetic peptide
DRAYGDYVGWNGFDY

SEQ ID NO: 4516 - protein, 11 aa, Artificial Sequence
  Description of Artificial Sequence: Synthetic peptide
RASQSISSFLA

SEQ ID NO: 4517 - protein, 7 aa, Artificial Sequence
  Description of Artificial Sequence: Synthetic peptide
DASYRAT

SEQ ID NO: 4518 - protein, 9 aa, Artificial Sequence
  Description of Artificial Sequence: Synthetic peptide
QQRGNWPIT

SEQ ID NO: 4519 - protein, 5 aa, Artificial Sequence
  Description of Artificial Sequence: Synthetic peptide
SYPMW

SEQ ID NO: 4520 - protein, 17 aa, Artificial Sequence
  Description of Artificial Sequence: Synthetic peptide
YIVPSGGSTLYADSVKG

SEQ ID NO: 4521 - protein, 15 aa, Artificial Sequence
  Description of Artificial Sequence: Synthetic peptide
DRAYGDYVGWNGFDY

SEQ ID NO: 4522 - protein, 11 aa, Artificial Sequence
  Description of Artificial Sequence: Synthetic peptide
RASQSISSFLA

SEQ ID NO: 4523 - protein, 7 aa, Artificial Sequence
  Description of Artificial Sequence: Synthetic peptide
DASYRAT

SEQ ID NO: 4524 - protein, 9 aa, Artificial Sequence
  Description of Artificial Sequence: Synthetic peptide
QQRGNWPIT

SEQ ID NO: 4525 - protein, 5 aa, Artificial Sequence
  Description of Artificial Sequence: Synthetic peptide
SYPMW

SEQ ID NO: 4526 - protein, 17 aa, Artificial Sequence
  Description of Artificial Sequence: Synthetic peptide
YIVPSGGYTYYADSVKG

SEQ ID NO: 4527 - protein, 15 aa, Artificial Sequence
  Description of Artificial Sequence: Synthetic peptide
DRAYGDYVGWNGFDY

SEQ ID NO: 4528 - protein, 11 aa, Artificial Sequence
  Description of Artificial Sequence: Synthetic peptide
RASQSISSFLA

SEQ ID NO: 4529 - protein, 7 aa, Artificial Sequence
  Description of Artificial Sequence: Synthetic peptide
DASYRAT

SEQ ID NO: 4530 - protein, 9 aa, Artificial Sequence
  Description of Artificial Sequence: Synthetic peptide
QQRGNWPIT

SEQ ID NO: 4531 - protein, 5 aa, Artificial Sequence
  Description of Artificial Sequence: Synthetic peptide
SYQMW

SEQ ID NO: 4532 - protein, 17 aa, Artificial Sequence
  Description of Artificial Sequence: Synthetic peptide
SIYPSGGATFYADSVKG

SEQ ID NO: 4533 - protein, 15 aa, Artificial Sequence
  Description of Artificial Sequence: Synthetic peptide
DRAYGDYVGWNGFDY

SEQ ID NO: 4534 - protein, 11 aa, Artificial Sequence
  Description of Artificial Sequence: Synthetic peptide
RASQSISSFLA

SEQ ID NO: 4535 - protein, 7 aa, Artificial Sequence
  Description of Artificial Sequence: Synthetic peptide
DASYRAT

SEQ ID NO: 4536 - protein, 9 aa, Artificial Sequence
  Description of Artificial Sequence: Synthetic peptide
QQRGNWPIT

SEQ ID NO: 4537 - protein, 5 aa, Artificial Sequence
  Description of Artificial Sequence: Synthetic peptide
SYSMW

SEQ ID NO: 4538 - protein, 17 aa, Artificial Sequence
  Description of Artificial Sequence: Synthetic peptide
VIYSSGGYTGYADSVKG

SEQ ID NO: 4539 - protein, 15 aa, Artificial Sequence
  Description of Artificial Sequence: Synthetic peptide
DRAYGDYVGWNGFDY

SEQ ID NO: 4540 - protein, 11 aa, Artificial Sequence
  Description of Artificial Sequence: Synthetic peptide
RASQSISSFLA

SEQ ID NO: 4541 - protein, 7 aa, Artificial Sequence
  Description of Artificial Sequence: Synthetic peptide
DASYRAT

SEQ ID NO: 4542 - protein, 9 aa, Artificial Sequence
  Description of Artificial Sequence: Synthetic peptide
QQRGNWPIT

SEQ ID NO: 4543 - protein, 5 aa, Artificial Sequence
  Description of Artificial Sequence: Synthetic peptide
TYAMI

SEQ ID NO: 4544 - protein, 17 aa, Artificial Sequence
  Description of Artificial Sequence: Synthetic peptide
YIGPSGGFTDYADSVKG

SEQ ID NO: 4545 - protein, 15 aa, Artificial Sequence
  Description of Artificial Sequence: Synthetic peptide
DRAYGDYVGWNGFDY

SEQ ID NO: 4546 - protein, 11 aa, Artificial Sequence
  Description of Artificial Sequence: Synthetic peptide
RASQSISSFLA

SEQ ID NO: 4547 - protein, 7 aa, Artificial Sequence
  Description of Artificial Sequence: Synthetic peptide
DASYRAT

SEQ ID NO: 4548 - protein, 9 aa, Artificial Sequence
  Description of Artificial Sequence: Synthetic peptide
QQRGNWPIT

SEQ ID NO: 4549 - protein, 5 aa, Artificial Sequence
  Description of Artificial Sequence: Synthetic peptide
TYAMW

SEQ ID NO: 4550 - protein, 17 aa, Artificial Sequence
  Description of Artificial Sequence: Synthetic peptide
YISPSGGGTFYADSVKG

SEQ ID NO: 4551 - protein, 15 aa, Artificial Sequence
  Description of Artificial Sequence: Synthetic peptide
DRAYGDYVGWNGFDY

SEQ ID NO: 4552 - protein, 11 aa, Artificial Sequence
  Description of Artificial Sequence: Synthetic peptide
RASQSISSFLA

SEQ ID NO: 4553 - protein, 7 aa, Artificial Sequence
  Description of Artificial Sequence: Synthetic peptide
DASYRAT

SEQ ID NO: 4554 - protein, 9 aa, Artificial Sequence
  Description of Artificial Sequence: Synthetic peptide
QQRGNWPIT

SEQ ID NO: 4555 - protein, 5 aa, Artificial Sequence
  Description of Artificial Sequence: Synthetic peptide
TYDMF

SEQ ID NO: 4556 - protein, 17 aa, Artificial Sequence
  Description of Artificial Sequence: Synthetic peptide
SISSSGGATFYADSVKG

SEQ ID NO: 4557 - protein, 15 aa, Artificial Sequence
  Description of Artificial Sequence: Synthetic peptide
DRAYGDYVGWNGFDY

SEQ ID NO: 4558 - protein, 11 aa, Artificial Sequence
  Description of Artificial Sequence: Synthetic peptide
RASQSISSFLA

SEQ ID NO: 4559 - protein, 7 aa, Artificial Sequence
  Description of Artificial Sequence: Synthetic peptide
DASYRAT

SEQ ID NO: 4560 - protein, 9 aa, Artificial Sequence
  Description of Artificial Sequence: Synthetic peptide
QQRGNWPIT

SEQ ID NO: 4561 - protein, 5 aa, Artificial Sequence
  Description of Artificial Sequence: Synthetic peptide
TYDMI

SEQ ID NO: 4562 - protein, 17 aa, Artificial Sequence
  Description of Artificial Sequence: Synthetic peptide
YISPSGGYTGYADSVKG

SEQ ID NO: 4563 - protein, 15 aa, Artificial Sequence
  Description of Artificial Sequence: Synthetic peptide
DRAYGDYVGWNGFDY

SEQ ID NO: 4564 - protein, 11 aa, Artificial Sequence
  Description of Artificial Sequence: Synthetic peptide
RASQSISSFLA

SEQ ID NO: 4565 - protein, 7 aa, Artificial Sequence
  Description of Artificial Sequence: Synthetic peptide
DASYRAT

SEQ ID NO: 4566 - protein, 9 aa, Artificial Sequence
  Description of Artificial Sequence: Synthetic peptide
QQRGNWPIT

SEQ ID NO: 4567 - protein, 5 aa, Artificial Sequence
  Description of Artificial Sequence: Synthetic peptide
TYDMI

SEQ ID NO: 4568 - protein, 17 aa, Artificial Sequence
  Description of Artificial Sequence: Synthetic peptide
YISSSGGFTDYADSVKG

SEQ ID NO: 4569 - protein, 15 aa, Artificial Sequence
  Description of Artificial Sequence: Synthetic peptide
DRAYGDYVGWNGFDY

SEQ ID NO: 4570 - protein, 11 aa, Artificial Sequence
  Description of Artificial Sequence: Synthetic peptide
RASQSISSFLA

SEQ ID NO: 4571 - protein, 7 aa, Artificial Sequence
  Description of Artificial Sequence: Synthetic peptide
DASYRAT

SEQ ID NO: 4572 - protein, 9 aa, Artificial Sequence
  Description of Artificial Sequence: Synthetic peptide
QQRGNWPIT

SEQ ID NO: 4573 - protein, 5 aa, Artificial Sequence
  Description of Artificial Sequence: Synthetic peptide
TYDMW

SEQ ID NO: 4574 - protein, 17 aa, Artificial Sequence
  Description of Artificial Sequence: Synthetic peptide
VIYPSGGPTYYADSVKG

SEQ ID NO: 4575 - protein, 15 aa, Artificial Sequence
  Description of Artificial Sequence: Synthetic peptide
DRAYGDYVGWNGFDY

SEQ ID NO: 4576 - protein, 11 aa, Artificial Sequence
  Description of Artificial Sequence: Synthetic peptide
RASQSISSFLA

SEQ ID NO: 4577 - protein, 7 aa, Artificial Sequence
  Description of Artificial Sequence: Synthetic peptide
DASYRAT

SEQ ID NO: 4578 - protein, 9 aa, Artificial Sequence
  Description of Artificial Sequence: Synthetic peptide
QQRGNWPIT

SEQ ID NO: 4579 - protein, 5 aa, Artificial Sequence
  Description of Artificial Sequence: Synthetic peptide
TYDMW

SEQ ID NO: 4580 - protein, 17 aa, Artificial Sequence
  Description of Artificial Sequence: Synthetic peptide
YISSSGGGTFYADSVKG

SEQ ID NO: 4581 - protein, 15 aa, Artificial Sequence
  Description of Artificial Sequence: Synthetic peptide
DRAYGDYVGWNGFDY

SEQ ID NO: 4582 - protein, 11 aa, Artificial Sequence
  Description of Artificial Sequence: Synthetic peptide
RASQSISSFLA

SEQ ID NO: 4583 - protein, 7 aa, Artificial Sequence
  Description of Artificial Sequence: Synthetic peptide
DASYRAT

SEQ ID NO: 4584 - protein, 9 aa, Artificial Sequence
  Description of Artificial Sequence: Synthetic peptide
QQRGNWPIT

SEQ ID NO: 4585 - protein, 5 aa, Artificial Sequence
  Description of Artificial Sequence: Synthetic peptide
TYEMW

SEQ ID NO: 4586 - protein, 17 aa, Artificial Sequence
  Description of Artificial Sequence: Synthetic peptide
YISSSGGGTGYADSVKG

SEQ ID NO: 4587 - protein, 15 aa, Artificial Sequence
  Description of Artificial Sequence: Synthetic peptide
DRAYGDYVGWNGFDY

SEQ ID NO: 4588 - protein, 11 aa, Artificial Sequence
  Description of Artificial Sequence: Synthetic peptide
RASQSISSFLA

SEQ ID NO: 4589 - protein, 7 aa, Artificial Sequence
  Description of Artificial Sequence: Synthetic peptide
DASYRAT

SEQ ID NO: 4590 - protein, 9 aa, Artificial Sequence
  Description of Artificial Sequence: Synthetic peptide
QQRGNWPIT

SEQ ID NO: 4591 - protein, 5 aa, Artificial Sequence
  Description of Artificial Sequence: Synthetic peptide
TYPMF

SEQ ID NO: 4592 - protein, 17 aa, Artificial Sequence
  Description of Artificial Sequence: Synthetic peptide
YISPSGGYTDYADSVKG

SEQ ID NO: 4593 - protein, 15 aa, Artificial Sequence
  Description of Artificial Sequence: Synthetic peptide
DRAYGDYVGWNGFDY

SEQ ID NO: 4594 - protein, 11 aa, Artificial Sequence
  Description of Artificial Sequence: Synthetic peptide
RASQSISSFLA

SEQ ID NO: 4595 - protein, 7 aa, Artificial Sequence
  Description of Artificial Sequence: Synthetic peptide
DASYRAT

SEQ ID NO: 4596 - protein, 9 aa, Artificial Sequence
  Description of Artificial Sequence: Synthetic peptide
QQRGNWPIT

SEQ ID NO: 4597 - protein, 5 aa, Artificial Sequence
  Description of Artificial Sequence: Synthetic peptide
TYPMI

SEQ ID NO: 4598 - protein, 17 aa, Artificial Sequence
  Description of Artificial Sequence: Synthetic peptide
YIVPSGGYTGYADSVKG

SEQ ID NO: 4599 - protein, 15 aa, Artificial Sequence
  Description of Artificial Sequence: Synthetic peptide
DRAYGDYVGWNGFDY

SEQ ID NO: 4600 - protein, 11 aa, Artificial Sequence
  Description of Artificial Sequence: Synthetic peptide
RASQSISSFLA

SEQ ID NO: 4601 - protein, 7 aa, Artificial Sequence
  Description of Artificial Sequence: Synthetic peptide
DASYRAT

SEQ ID NO: 4602 - protein, 9 aa, Artificial Sequence
  Description of Artificial Sequence: Synthetic peptide
QQRGNWPIT

SEQ ID NO: 4603 - protein, 5 aa, Artificial Sequence
  Description of Artificial Sequence: Synthetic peptide
TYPMM

SEQ ID NO: 4604 - protein, 17 aa, Artificial Sequence
  Description of Artificial Sequence: Synthetic peptide
YIYPSGGATFYADSVKG

SEQ ID NO: 4605 - protein, 15 aa, Artificial Sequence
  Description of Artificial Sequence: Synthetic peptide
DRAYGDYVGWNGFDY

SEQ ID NO: 4606 - protein, 11 aa, Artificial Sequence
  Description of Artificial Sequence: Synthetic peptide
RASQSISSFLA

SEQ ID NO: 4607 - protein, 7 aa, Artificial Sequence
  Description of Artificial Sequence: Synthetic peptide
DASYRAT

SEQ ID NO: 4608 - protein, 9 aa, Artificial Sequence
  Description of Artificial Sequence: Synthetic peptide
QQRGNWPIT

SEQ ID NO: 4609 - protein, 5 aa, Artificial Sequence
  Description of Artificial Sequence: Synthetic peptide
TYPMW

SEQ ID NO: 4610 - protein, 17 aa, Artificial Sequence
  Description of Artificial Sequence: Synthetic peptide
SISPSGGATYYADSVKG

SEQ ID NO: 4611 - protein, 15 aa, Artificial Sequence
  Description of Artificial Sequence: Synthetic peptide
DRAYGDYVGWNGFDY

SEQ ID NO: 4612 - protein, 11 aa, Artificial Sequence
  Description of Artificial Sequence: Synthetic peptide
RASQSISSFLA

SEQ ID NO: 4613 - protein, 7 aa, Artificial Sequence
  Description of Artificial Sequence: Synthetic peptide
DASYRAT

SEQ ID NO: 4614 - protein, 9 aa, Artificial Sequence
  Description of Artificial Sequence: Synthetic peptide
QQRGNWPIT

SEQ ID NO: 4615 - protein, 5 aa, Artificial Sequence
  Description of Artificial Sequence: Synthetic peptide
TYPMW

SEQ ID NO: 4616 - protein, 17 aa, Artificial Sequence
  Description of Artificial Sequence: Synthetic peptide
SIVPSGGATYYADSVKG

SEQ ID NO: 4617 - protein, 15 aa, Artificial Sequence
  Description of Artificial Sequence: Synthetic peptide
DRAYGDYVGWNGFDY

SEQ ID NO: 4618 - protein, 11 aa, Artificial Sequence
  Description of Artificial Sequence: Synthetic peptide
RASQSISSFLA

SEQ ID NO: 4619 - protein, 7 aa, Artificial Sequence
  Description of Artificial Sequence: Synthetic peptide
DASYRAT

SEQ ID NO: 4620 - protein, 9 aa, Artificial Sequence
  Description of Artificial Sequence: Synthetic peptide
QQRGNWPIT

SEQ ID NO: 4621 - protein, 5 aa, Artificial Sequence
  Description of Artificial Sequence: Synthetic peptide
TYPMW

SEQ ID NO: 4622 - protein, 17 aa, Artificial Sequence
  Description of Artificial Sequence: Synthetic peptide
VIYSSGGYTGYADSVKG

SEQ ID NO: 4623 - protein, 15 aa, Artificial Sequence
  Description of Artificial Sequence: Synthetic peptide
DRAYGDYVGWNGFDY

SEQ ID NO: 4624 - protein, 11 aa, Artificial Sequence
  Description of Artificial Sequence: Synthetic peptide
RASQSISSFLA

SEQ ID NO: 4625 - protein, 7 aa, Artificial Sequence
  Description of Artificial Sequence: Synthetic peptide
DASYRAT

SEQ ID NO: 4626 - protein, 9 aa, Artificial Sequence
  Description of Artificial Sequence: Synthetic peptide
QQRGNWPIT

SEQ ID NO: 4627 - protein, 5 aa, Artificial Sequence
  Description of Artificial Sequence: Synthetic peptide
TYPMW

SEQ ID NO: 4628 - protein, 17 aa, Artificial Sequence
  Description of Artificial Sequence: Synthetic peptide
YISPSGGATFYADSVKG

SEQ ID NO: 4629 - protein, 15 aa, Artificial Sequence
  Description of Artificial Sequence: Synthetic peptide
DRAYGDYVGWNGFDY

SEQ ID NO: 4630 - protein, 11 aa, Artificial Sequence
  Description of Artificial Sequence: Synthetic peptide
RASQSISSFLA

SEQ ID NO: 4631 - protein, 7 aa, Artificial Sequence
  Description of Artificial Sequence: Synthetic peptide
DASYRAT

SEQ ID NO: 4632 - protein, 9 aa, Artificial Sequence
  Description of Artificial Sequence: Synthetic peptide
QQRGNWPIT

SEQ ID NO: 4633 - protein, 5 aa, Artificial Sequence
  Description of Artificial Sequence: Synthetic peptide
TYPMW

SEQ ID NO: 4634 - protein, 17 aa, Artificial Sequence
  Description of Artificial Sequence: Synthetic peptide
YISPSGGGTFYADSVKG

SEQ ID NO: 4635 - protein, 15 aa, Artificial Sequence
  Description of Artificial Sequence: Synthetic peptide
DRAYGDYVGWNGFDY

SEQ ID NO: 4636 - protein, 11 aa, Artificial Sequence
  Description of Artificial Sequence: Synthetic peptide
RASQSISSFLA

SEQ ID NO: 4637 - protein, 7 aa, Artificial Sequence
  Description of Artificial Sequence: Synthetic peptide
DASYRAT

SEQ ID NO: 4638 - protein, 9 aa, Artificial Sequence
  Description of Artificial Sequence: Synthetic peptide
QQRGNWPIT

SEQ ID NO: 4639 - protein, 5 aa, Artificial Sequence
  Description of Artificial Sequence: Synthetic peptide
TYPMW

SEQ ID NO: 4640 - protein, 17 aa, Artificial Sequence
  Description of Artificial Sequence: Synthetic peptide
YIVPSGGYTDYADSVKG

SEQ ID NO: 4641 - protein, 15 aa, Artificial Sequence
  Description of Artificial Sequence: Synthetic peptide
DRAYGDYVGWNGFDY

SEQ ID NO: 4642 - protein, 11 aa, Artificial Sequence
  Description of Artificial Sequence: Synthetic peptide
RASQSISSFLA

SEQ ID NO: 4643 - protein, 7 aa, Artificial Sequence
  Description of Artificial Sequence: Synthetic peptide
DASYRAT

SEQ ID NO: 4644 - protein, 9 aa, Artificial Sequence
  Description of Artificial Sequence: Synthetic peptide
QQRGNWPIT

SEQ ID NO: 4645 - protein, 5 aa, Artificial Sequence
  Description of Artificial Sequence: Synthetic peptide
TYPMW

SEQ ID NO: 4646 - protein, 17 aa, Artificial Sequence
  Description of Artificial Sequence: Synthetic peptide
YIYPSGGGTFYADSVKG

SEQ ID NO: 4647 - protein, 15 aa, Artificial Sequence
  Description of Artificial Sequence: Synthetic peptide
DRAYGDYVGWNGFDY

SEQ ID NO: 4648 - protein, 11 aa, Artificial Sequence
  Description of Artificial Sequence: Synthetic peptide
RASQSISSFLA

SEQ ID NO: 4649 - protein, 7 aa, Artificial Sequence
  Description of Artificial Sequence: Synthetic peptide
DASYRAT

SEQ ID NO: 4650 - protein, 9 aa, Artificial Sequence
  Description of Artificial Sequence: Synthetic peptide
QQRGNWPIT

SEQ ID NO: 4651 - protein, 5 aa, Artificial Sequence
  Description of Artificial Sequence: Synthetic peptide
TYQMW

SEQ ID NO: 4652 - protein, 16 aa, Artificial Sequence
  Description of Artificial Sequence: Synthetic peptide
SIYSSGGTFYADSVKG

SEQ ID NO: 4653 - protein, 15 aa, Artificial Sequence
  Description of Artificial Sequence: Synthetic peptide
DRAYGDYVGWNGFDY

SEQ ID NO: 4654 - protein, 11 aa, Artificial Sequence
  Description of Artificial Sequence: Synthetic peptide
RASQSISSFLA

SEQ ID NO: 4655 - protein, 7 aa, Artificial Sequence
  Description of Artificial Sequence: Synthetic peptide
DASYRAT

SEQ ID NO: 4656 - protein, 9 aa, Artificial Sequence
  Description of Artificial Sequence: Synthetic peptide
QQRGNWPIT

SEQ ID NO: 4657 - protein, 5 aa, Artificial Sequence
  Description of Artificial Sequence: Synthetic peptide
TYSMI

SEQ ID NO: 4658 - protein, 17 aa, Artificial Sequence
  Description of Artificial Sequence: Synthetic peptide
YISPSGGFTDYADSVKG

SEQ ID NO: 4659 - protein, 15 aa, Artificial Sequence
  Description of Artificial Sequence: Synthetic peptide
DRAYGDYVGWNGFDY

SEQ ID NO: 4660 - protein, 11 aa, Artificial Sequence
  Description of Artificial Sequence: Synthetic peptide
RASQSISSFLA

SEQ ID NO: 4661 - protein, 7 aa, Artificial Sequence
  Description of Artificial Sequence: Synthetic peptide
DASYRAT

SEQ ID NO: 4662 - protein, 9 aa, Artificial Sequence
  Description of Artificial Sequence: Synthetic peptide
QQRGNWPIT

SEQ ID NO: 4663 - protein, 5 aa, Artificial Sequence
  Description of Artificial Sequence: Synthetic peptide
VYDMI

SEQ ID NO: 4664 - protein, 17 aa, Artificial Sequence
  Description of Artificial Sequence: Synthetic peptide
YIGPSGGMTLYADSVKG

SEQ ID NO: 4665 - protein, 15 aa, Artificial Sequence
  Description of Artificial Sequence: Synthetic peptide
DRAYGDYVGWNGFDY

SEQ ID NO: 4666 - protein, 11 aa, Artificial Sequence
  Description of Artificial Sequence: Synthetic peptide
RASQSISSFLA

SEQ ID NO: 4667 - protein, 7 aa, Artificial Sequence
  Description of Artificial Sequence: Synthetic peptide
DASYRAT

SEQ ID NO: 4668 - protein, 9 aa, Artificial Sequence
  Description of Artificial Sequence: Synthetic peptide
QQRGNWPIT

SEQ ID NO: 4669 - protein, 5 aa, Artificial Sequence
  Description of Artificial Sequence: Synthetic peptide
VYDMW

SEQ ID NO: 4670 - protein, 17 aa, Artificial Sequence
  Description of Artificial Sequence: Synthetic peptide
VIYPSGGATYYADSVKG

SEQ ID NO: 4671 - protein, 15 aa, Artificial Sequence
  Description of Artificial Sequence: Synthetic peptide
DRAYGDYVGWNGFDY

SEQ ID NO: 4672 - protein, 11 aa, Artificial Sequence
  Description of Artificial Sequence: Synthetic peptide
RASQSISSFLA

SEQ ID NO: 4673 - protein, 7 aa, Artificial Sequence
  Description of Artificial Sequence: Synthetic peptide
DASYRAT

SEQ ID NO: 4674 - protein, 9 aa, Artificial Sequence
  Description of Artificial Sequence: Synthetic peptide
QQRGNWPIT

SEQ ID NO: 4675 - protein, 5 aa, Artificial Sequence
  Description of Artificial Sequence: Synthetic peptide
VYDMW

SEQ ID NO: 4676 - protein, 17 aa, Artificial Sequence
  Description of Artificial Sequence: Synthetic peptide
VIYPSGGYTDYADSVKG

SEQ ID NO: 4677 - protein, 15 aa, Artificial Sequence
  Description of Artificial Sequence: Synthetic peptide
DRAYGDYVGWNGFDY

SEQ ID NO: 4678 - protein, 11 aa, Artificial Sequence
  Description of Artificial Sequence: Synthetic peptide
RASQSISSFLA

SEQ ID NO: 4679 - protein, 7 aa, Artificial Sequence
  Description of Artificial Sequence: Synthetic peptide
DASYRAT

SEQ ID NO: 4680 - protein, 9 aa, Artificial Sequence
  Description of Artificial Sequence: Synthetic peptide
QQRGNWPIT

SEQ ID NO: 4681 - protein, 5 aa, Artificial Sequence
  Description of Artificial Sequence: Synthetic peptide
VYDMW

SEQ ID NO: 4682 - protein, 17 aa, Artificial Sequence
  Description of Artificial Sequence: Synthetic peptide
VIYSSGGATFYADSVKG

SEQ ID NO: 4683 - protein, 15 aa, Artificial Sequence
  Description of Artificial Sequence: Synthetic peptide
DRAYGDYVGWNGFDY

SEQ ID NO: 4684 - protein, 11 aa, Artificial Sequence
  Description of Artificial Sequence: Synthetic peptide
RASQSISSFLA

SEQ ID NO: 4685 - protein, 7 aa, Artificial Sequence
  Description of Artificial Sequence: Synthetic peptide
DASYRAT

SEQ ID NO: 4686 - protein, 9 aa, Artificial Sequence
  Description of Artificial Sequence: Synthetic peptide
QQRGNWPIT

SEQ ID NO: 4687 - protein, 5 aa, Artificial Sequence
  Description of Artificial Sequence: Synthetic peptide
VYDMW

SEQ ID NO: 4688 - protein, 17 aa, Artificial Sequence
  Description of Artificial Sequence: Synthetic peptide
VIYSSGGPTFYADSVKG

SEQ ID NO: 4689 - protein, 15 aa, Artificial Sequence
  Description of Artificial Sequence: Synthetic peptide
DRAYGDYVGWNGFDY

SEQ ID NO: 4690 - protein, 11 aa, Artificial Sequence
  Description of Artificial Sequence: Synthetic peptide
RASQSISSFLA

SEQ ID NO: 4691 - protein, 7 aa, Artificial Sequence
  Description of Artificial Sequence: Synthetic peptide
DASYRAT

SEQ ID NO: 4692 - protein, 9 aa, Artificial Sequence
  Description of Artificial Sequence: Synthetic peptide
QQRGNWPIT

SEQ ID NO: 4693 - protein, 5 aa, Artificial Sequence
  Description of Artificial Sequence: Synthetic peptide
VYDMW

SEQ ID NO: 4694 - protein, 17 aa, Artificial Sequence
  Description of Artificial Sequence: Synthetic peptide
YISPSGGFTDYADSVKG

SEQ ID NO: 4695 - protein, 15 aa, Artificial Sequence
  Description of Artificial Sequence: Synthetic peptide
DRAYGDYVGWNGFDY

SEQ ID NO: 4696 - protein, 11 aa, Artificial Sequence
  Description of Artificial Sequence: Synthetic peptide
RASQSISSFLA

SEQ ID NO: 4697 - protein, 7 aa, Artificial Sequence
  Description of Artificial Sequence: Synthetic peptide
DASYRAT

SEQ ID NO: 4698 - protein, 9 aa, Artificial Sequence
  Description of Artificial Sequence: Synthetic peptide
QQRGNWPIT

SEQ ID NO: 4699 - protein, 5 aa, Artificial Sequence
  Description of Artificial Sequence: Synthetic peptide
VYEMW

SEQ ID NO: 4700 - protein, 17 aa, Artificial Sequence
  Description of Artificial Sequence: Synthetic peptide
YISPSGGGTFYADSVKG

SEQ ID NO: 4701 - protein, 15 aa, Artificial Sequence
  Description of Artificial Sequence: Synthetic peptide
DRAYGDYVGWNGFDY

SEQ ID NO: 4702 - protein, 11 aa, Artificial Sequence
  Description of Artificial Sequence: Synthetic peptide
RASQSISSFLA

SEQ ID NO: 4703 - protein, 7 aa, Artificial Sequence
  Description of Artificial Sequence: Synthetic peptide
DASYRAT

SEQ ID NO: 4704 - protein, 9 aa, Artificial Sequence
  Description of Artificial Sequence: Synthetic peptide
QQRGNWPIT

SEQ ID NO: 4705 - protein, 5 aa, Artificial Sequence
  Description of Artificial Sequence: Synthetic peptide
VYNMW

SEQ ID NO: 4706 - protein, 17 aa, Artificial Sequence
  Description of Artificial Sequence: Synthetic peptide
SISPSGGGTFYADSVKG

SEQ ID NO: 4707 - protein, 15 aa, Artificial Sequence
  Description of Artificial Sequence: Synthetic peptide
DRAYGDYVGWNGFDY

SEQ ID NO: 4708 - protein, 11 aa, Artificial Sequence
  Description of Artificial Sequence: Synthetic peptide
RASQSISSFLA

SEQ ID NO: 4709 - protein, 7 aa, Artificial Sequence
  Description of Artificial Sequence: Synthetic peptide
DASYRAT

SEQ ID NO: 4710 - protein, 9 aa, Artificial Sequence
  Description of Artificial Sequence: Synthetic peptide
QQRGNWPIT

SEQ ID NO: 4711 - protein, 5 aa, Artificial Sequence
  Description of Artificial Sequence: Synthetic peptide
VYPMW

SEQ ID NO: 4712 - protein, 17 aa, Artificial Sequence
  Description of Artificial Sequence: Synthetic peptide
SISPSGGATYYADSVKG

SEQ ID NO: 4713 - protein, 15 aa, Artificial Sequence
  Description of Artificial Sequence: Synthetic peptide
DRAYGDYVGWNGFDY

SEQ ID NO: 4714 - protein, 11 aa, Artificial Sequence
  Description of Artificial Sequence: Synthetic peptide
RASQSISSFLA

SEQ ID NO: 4715 - protein, 7 aa, Artificial Sequence
  Description of Artificial Sequence: Synthetic peptide
DASYRAT

SEQ ID NO: 4716 - protein, 9 aa, Artificial Sequence
  Description of Artificial Sequence: Synthetic peptide
QQRGNWPIT

SEQ ID NO: 4717 - protein, 5 aa, Artificial Sequence
  Description of Artificial Sequence: Synthetic peptide
VYPMW

SEQ ID NO: 4718 - protein, 17 aa, Artificial Sequence
  Description of Artificial Sequence: Synthetic peptide
SISPSGGYTGYADSVKG

SEQ ID NO: 4719 - protein, 15 aa, Artificial Sequence
  Description of Artificial Sequence: Synthetic peptide
DRAYGDYVGWNGFDY

SEQ ID NO: 4720 - protein, 11 aa, Artificial Sequence
  Description of Artificial Sequence: Synthetic peptide
RASQSISSFLA

SEQ ID NO: 4721 - protein, 7 aa, Artificial Sequence
  Description of Artificial Sequence: Synthetic peptide
DASYRAT

SEQ ID NO: 4722 - protein, 9 aa, Artificial Sequence
  Description of Artificial Sequence: Synthetic peptide
QQRGNWPIT

SEQ ID NO: 4723 - protein, 5 aa, Artificial Sequence
  Description of Artificial Sequence: Synthetic peptide
VYPMW

SEQ ID NO: 4724 - protein, 16 aa, Artificial Sequence
  Description of Artificial Sequence: Synthetic peptide
SISSGGATYYADSVKG

SEQ ID NO: 4725 - protein, 15 aa, Artificial Sequence
  Description of Artificial Sequence: Synthetic peptide
DRAYGDYVGWNGFDY

SEQ ID NO: 4726 - protein, 11 aa, Artificial Sequence
  Description of Artificial Sequence: Synthetic peptide
RASQSISSFLA

SEQ ID NO: 4727 - protein, 7 aa, Artificial Sequence
  Description of Artificial Sequence: Synthetic peptide
DASYRAT

SEQ ID NO: 4728 - protein, 9 aa, Artificial Sequence
  Description of Artificial Sequence: Synthetic peptide
QQRGNWPIT

SEQ ID NO: 4729 - protein, 5 aa, Artificial Sequence
  Description of Artificial Sequence: Synthetic peptide
VYPMW

SEQ ID NO: 4730 - protein, 17 aa, Artificial Sequence
  Description of Artificial Sequence: Synthetic peptide
WISPSGGGTFYADSVKG

SEQ ID NO: 4731 - protein, 15 aa, Artificial Sequence
  Description of Artificial Sequence: Synthetic peptide
DRAYGDYVGWNGFDY

SEQ ID NO: 4732 - protein, 11 aa, Artificial Sequence
  Description of Artificial Sequence: Synthetic peptide
RASQSISSFLA

SEQ ID NO: 4733 - protein, 7 aa, Artificial Sequence
  Description of Artificial Sequence: Synthetic peptide
DASYRAT

SEQ ID NO: 4734 - protein, 9 aa, Artificial Sequence
  Description of Artificial Sequence: Synthetic peptide
QQRGNWPIT

SEQ ID NO: 4735 - protein, 5 aa, Artificial Sequence
  Description of Artificial Sequence: Synthetic peptide
VYPMW

SEQ ID NO: 4736 - protein, 17 aa, Artificial Sequence
  Description of Artificial Sequence: Synthetic peptide
WISSSGGGTAYADSVKG

SEQ ID NO: 4737 - protein, 15 aa, Artificial Sequence
  Description of Artificial Sequence: Synthetic peptide
DRAYGDYVGWNGFDY

SEQ ID NO: 4738 - protein, 11 aa, Artificial Sequence
  Description of Artificial Sequence: Synthetic peptide
RASQSISSFLA

SEQ ID NO: 4739 - protein, 7 aa, Artificial Sequence
  Description of Artificial Sequence: Synthetic peptide
DASYRAT

SEQ ID NO: 4740 - protein, 9 aa, Artificial Sequence
  Description of Artificial Sequence: Synthetic peptide
QQRGNWPIT

SEQ ID NO: 4741 - protein, 5 aa, Artificial Sequence
  Description of Artificial Sequence: Synthetic peptide
VYPMW

SEQ ID NO: 4742 - protein, 17 aa, Artificial Sequence
  Description of Artificial Sequence: Synthetic peptide
YIVPSGGATYYADSVKG

SEQ ID NO: 4743 - protein, 15 aa, Artificial Sequence
  Description of Artificial Sequence: Synthetic peptide
DRAYGDYVGWNGFDY

SEQ ID NO: 4744 - protein, 11 aa, Artificial Sequence
  Description of Artificial Sequence: Synthetic peptide
RASQSISSFLA

SEQ ID NO: 4745 - protein, 7 aa, Artificial Sequence
  Description of Artificial Sequence: Synthetic peptide
DASYRAT

SEQ ID NO: 4746 - protein, 9 aa, Artificial Sequence
  Description of Artificial Sequence: Synthetic peptide
QQRGNWPIT

SEQ ID NO: 4747 - protein, 5 aa, Artificial Sequence
  Description of Artificial Sequence: Synthetic peptide
VYPMW

SEQ ID NO: 4748 - protein, 17 aa, Artificial Sequence
  Description of Artificial Sequence: Synthetic peptide
YIYPSGGATYYADSVKG

SEQ ID NO: 4749 - protein, 15 aa, Artificial Sequence
  Description of Artificial Sequence: Synthetic peptide
DRAYGDYVGWNGFDY

SEQ ID NO: 4750 - protein, 11 aa, Artificial Sequence
  Description of Artificial Sequence: Synthetic peptide
RASQSISSFLA

SEQ ID NO: 4751 - protein, 7 aa, Artificial Sequence
  Description of Artificial Sequence: Synthetic peptide
DASYRAT

SEQ ID NO: 4752 - protein, 9 aa, Artificial Sequence
  Description of Artificial Sequence: Synthetic peptide
QQRGNWPIT

SEQ ID NO: 4753 - protein, 5 aa, Artificial Sequence
  Description of Artificial Sequence: Synthetic peptide
VYQMW

SEQ ID NO: 4754 - protein, 17 aa, Artificial Sequence
  Description of Artificial Sequence: Synthetic peptide
VIYPSGGTTFYADSVKG

SEQ ID NO: 4755 - protein, 15 aa, Artificial Sequence
  Description of Artificial Sequence: Synthetic peptide
DRAYGDYVGWNGFDY

SEQ ID NO: 4756 - protein, 11 aa, Artificial Sequence
  Description of Artificial Sequence: Synthetic peptide
RASQSISSFLA

SEQ ID NO: 4757 - protein, 7 aa, Artificial Sequence
  Description of Artificial Sequence: Synthetic peptide
DASYRAT

SEQ ID NO: 4758 - protein, 9 aa, Artificial Sequence
  Description of Artificial Sequence: Synthetic peptide
QQRGNWPIT

SEQ ID NO: 4759 - protein, 5 aa, Artificial Sequence
  Description of Artificial Sequence: Synthetic peptide
VYWMI

SEQ ID NO: 4760 - protein, 17 aa, Artificial Sequence
  Description of Artificial Sequence: Synthetic peptide
YISPSGGGTFYADSVKG

SEQ ID NO: 4761 - protein, 15 aa, Artificial Sequence
  Description of Artificial Sequence: Synthetic peptide
DRAYGDYVGWNGFDY

SEQ ID NO: 4762 - protein, 11 aa, Artificial Sequence
  Description of Artificial Sequence: Synthetic peptide
RASQSISSFLA

SEQ ID NO: 4763 - protein, 7 aa, Artificial Sequence
  Description of Artificial Sequence: Synthetic peptide
DASYRAT

SEQ ID NO: 4764 - protein, 9 aa, Artificial Sequence
  Description of Artificial Sequence: Synthetic peptide
QQRGNWPIT

SEQ ID NO: 4765 - protein, 5 aa, Artificial Sequence
  Description of Artificial Sequence: Synthetic peptide
WYAMW

SEQ ID NO: 4766 - protein, 17 aa, Artificial Sequence
  Description of Artificial Sequence: Synthetic peptide
SISPSGGGTYYADSVKG

SEQ ID NO: 4767 - protein, 15 aa, Artificial Sequence
  Description of Artificial Sequence: Synthetic peptide
DRAYGDYVGWNGFDY

SEQ ID NO: 4768 - protein, 11 aa, Artificial Sequence
  Description of Artificial Sequence: Synthetic peptide
RASQSISSFLA

SEQ ID NO: 4769 - protein, 7 aa, Artificial Sequence
  Description of Artificial Sequence: Synthetic peptide
DASYRAT

SEQ ID NO: 4770 - protein, 9 aa, Artificial Sequence
  Description of Artificial Sequence: Synthetic peptide
QQRGNWPIT

SEQ ID NO: 4771 - protein, 5 aa, Artificial Sequence
  Description of Artificial Sequence: Synthetic peptide
WYDMF

SEQ ID NO: 4772 - protein, 17 aa, Artificial Sequence
  Description of Artificial Sequence: Synthetic peptide
SISPSGGATFYADSVKG

SEQ ID NO: 4773 - protein, 15 aa, Artificial Sequence
  Description of Artificial Sequence: Synthetic peptide
DRAYGDYVGWNGFDY

SEQ ID NO: 4774 - protein, 11 aa, Artificial Sequence
  Description of Artificial Sequence: Synthetic peptide
RASQSISSFLA

SEQ ID NO: 4775 - protein, 7 aa, Artificial Sequence
  Description of Artificial Sequence: Synthetic peptide
DASYRAT

SEQ ID NO: 4776 - protein, 9 aa, Artificial Sequence
  Description of Artificial Sequence: Synthetic peptide
QQRGNWPIT

SEQ ID NO: 4777 - protein, 5 aa, Artificial Sequence
  Description of Artificial Sequence: Synthetic peptide
WYDMW

SEQ ID NO: 4778 - protein, 17 aa, Artificial Sequence
  Description of Artificial Sequence: Synthetic peptide
VIYPSGGATYYADSVKG

SEQ ID NO: 4779 - protein, 15 aa, Artificial Sequence
  Description of Artificial Sequence: Synthetic peptide
DRAYGDYVGWNGFDY

SEQ ID NO: 4780 - protein, 11 aa, Artificial Sequence
  Description of Artificial Sequence: Synthetic peptide
RASQSISSFLA

SEQ ID NO: 4781 - protein, 7 aa, Artificial Sequence
  Description of Artificial Sequence: Synthetic peptide
DASYRAT

SEQ ID NO: 4782 - protein, 9 aa, Artificial Sequence
  Description of Artificial Sequence: Synthetic peptide
QQRGNWPIT

SEQ ID NO: 4783 - protein, 5 aa, Artificial Sequence
  Description of Artificial Sequence: Synthetic peptide
WYDMW

SEQ ID NO: 4784 - protein, 17 aa, Artificial Sequence
  Description of Artificial Sequence: Synthetic peptide
VIYPSGGFTDYADSVKG

SEQ ID NO: 4785 - protein, 15 aa, Artificial Sequence
  Description of Artificial Sequence: Synthetic peptide
DRAYGDYVGWNGFDY

SEQ ID NO: 4786 - protein, 11 aa, Artificial Sequence
  Description of Artificial Sequence: Synthetic peptide
RASQSISSFLA

SEQ ID NO: 4787 - protein, 7 aa, Artificial Sequence
  Description of Artificial Sequence: Synthetic peptide
DASYRAT

SEQ ID NO: 4788 - protein, 9 aa, Artificial Sequence
  Description of Artificial Sequence: Synthetic peptide
QQRGNWPIT

SEQ ID NO: 4789 - protein, 5 aa, Artificial Sequence
  Description of Artificial Sequence: Synthetic peptide
WYDMW

SEQ ID NO: 4790 - protein, 17 aa, Artificial Sequence
  Description of Artificial Sequence: Synthetic peptide
VIYPSGGYTGYADSVKG

SEQ ID NO: 4791 - protein, 15 aa, Artificial Sequence
  Description of Artificial Sequence: Synthetic peptide
DRAYGDYVGWNGFDY

SEQ ID NO: 4792 - protein, 11 aa, Artificial Sequence
  Description of Artificial Sequence: Synthetic peptide
RASQSISSFLA

SEQ ID NO: 4793 - protein, 7 aa, Artificial Sequence
  Description of Artificial Sequence: Synthetic peptide
DASYRAT

SEQ ID NO: 4794 - protein, 9 aa, Artificial Sequence
  Description of Artificial Sequence: Synthetic peptide
QQRGNWPIT

SEQ ID NO: 4795 - protein, 5 aa, Artificial Sequence
  Description of Artificial Sequence: Synthetic peptide
WYDMW

SEQ ID NO: 4796 - protein, 17 aa, Artificial Sequence
  Description of Artificial Sequence: Synthetic peptide
VIYSSGGATFYADSVKG

SEQ ID NO: 4797 - protein, 15 aa, Artificial Sequence
  Description of Artificial Sequence: Synthetic peptide
DRAYGDYVGWNGFDY

SEQ ID NO: 4798 - protein, 11 aa, Artificial Sequence
  Description of Artificial Sequence: Synthetic peptide
RASQSISSFLA

SEQ ID NO: 4799 - protein, 7 aa, Artificial Sequence
  Description of Artificial Sequence: Synthetic peptide
DASYRAT

SEQ ID NO: 4800 - protein, 9 aa, Artificial Sequence
  Description of Artificial Sequence: Synthetic peptide
QQRGNWPIT

SEQ ID NO: 4801 - protein, 5 aa, Artificial Sequence
  Description of Artificial Sequence: Synthetic peptide
WYDMW

SEQ ID NO: 4802 - protein, 17 aa, Artificial Sequence
  Description of Artificial Sequence: Synthetic peptide
VIYSSGGPTFYADSVKG

SEQ ID NO: 4803 - protein, 15 aa, Artificial Sequence
  Description of Artificial Sequence: Synthetic peptide
DRAYGDYVGWNGFDY

SEQ ID NO: 4804 - protein, 11 aa, Artificial Sequence
  Description of Artificial Sequence: Synthetic peptide
RASQSISSFLA

SEQ ID NO: 4805 - protein, 7 aa, Artificial Sequence
  Description of Artificial Sequence: Synthetic peptide
DASYRAT

SEQ ID NO: 4806 - protein, 9 aa, Artificial Sequence
  Description of Artificial Sequence: Synthetic peptide
QQRGNWPIT

SEQ ID NO: 4807 - protein, 5 aa, Artificial Sequence
  Description of Artificial Sequence: Synthetic peptide
WYEMW

SEQ ID NO: 4808 - protein, 17 aa, Artificial Sequence
  Description of Artificial Sequence: Synthetic peptide
WISPSGGGTQYADSVKG

SEQ ID NO: 4809 - protein, 15 aa, Artificial Sequence
  Description of Artificial Sequence: Synthetic peptide
DRAYGDYVGWNGFDY

SEQ ID NO: 4810 - protein, 11 aa, Artificial Sequence
  Description of Artificial Sequence: Synthetic peptide
RASQSISSFLA

SEQ ID NO: 4811 - protein, 7 aa, Artificial Sequence
  Description of Artificial Sequence: Synthetic peptide
DASYRAT

SEQ ID NO: 4812 - protein, 9 aa, Artificial Sequence
  Description of Artificial Sequence: Synthetic peptide
QQRGNWPIT

SEQ ID NO: 4813 - protein, 5 aa, Artificial Sequence
  Description of Artificial Sequence: Synthetic peptide
WYEMW

SEQ ID NO: 4814 - protein, 17 aa, Artificial Sequence
  Description of Artificial Sequence: Synthetic peptide
YISPSGGGTYYADSVKG

SEQ ID NO: 4815 - protein, 15 aa, Artificial Sequence
  Description of Artificial Sequence: Synthetic peptide
DRAYGDYVGWNGFDY

SEQ ID NO: 4816 - protein, 11 aa, Artificial Sequence
  Description of Artificial Sequence: Synthetic peptide
RASQSISSFLA

SEQ ID NO: 4817 - protein, 7 aa, Artificial Sequence
  Description of Artificial Sequence: Synthetic peptide
DASYRAT

SEQ ID NO: 4818 - protein, 9 aa, Artificial Sequence
  Description of Artificial Sequence: Synthetic peptide
QQRGNWPIT

SEQ ID NO: 4819 - protein, 5 aa, Artificial Sequence
  Description of Artificial Sequence: Synthetic peptide
WYNMW

SEQ ID NO: 4820 - protein, 17 aa, Artificial Sequence
  Description of Artificial Sequence: Synthetic peptide
VIYPSGGGTFYADSVKG

SEQ ID NO: 4821 - protein, 15 aa, Artificial Sequence
  Description of Artificial Sequence: Synthetic peptide
DRAYGDYVGWNGFDY

SEQ ID NO: 4822 - protein, 11 aa, Artificial Sequence
  Description of Artificial Sequence: Synthetic peptide
RASQSISSFLA

SEQ ID NO: 4823 - protein, 7 aa, Artificial Sequence
  Description of Artificial Sequence: Synthetic peptide
DASYRAT

SEQ ID NO: 4824 - protein, 9 aa, Artificial Sequence
  Description of Artificial Sequence: Synthetic peptide
QQRGNWPIT

SEQ ID NO: 4825 - protein, 5 aa, Artificial Sequence
  Description of Artificial Sequence: Synthetic peptide
WYNMW

SEQ ID NO: 4826 - protein, 17 aa, Artificial Sequence
  Description of Artificial Sequence: Synthetic peptide
YIVSSGGFTDYADSVKG

SEQ ID NO: 4827 - protein, 15 aa, Artificial Sequence
  Description of Artificial Sequence: Synthetic peptide
DRAYGDYVGWNGFDY

SEQ ID NO: 4828 - protein, 11 aa, Artificial Sequence
  Description of Artificial Sequence: Synthetic peptide
RASQSISSFLA

SEQ ID NO: 4829 - protein, 7 aa, Artificial Sequence
  Description of Artificial Sequence: Synthetic peptide
DASYRAT

SEQ ID NO: 4830 - protein, 9 aa, Artificial Sequence
  Description of Artificial Sequence: Synthetic peptide
QQRGNWPIT

SEQ ID NO: 4831 - protein, 5 aa, Artificial Sequence
  Description of Artificial Sequence: Synthetic peptide
WYPMI

SEQ ID NO: 4832 - protein, 17 aa, Artificial Sequence
  Description of Artificial Sequence: Synthetic peptide
YISSSGGYTSYADSVKG

SEQ ID NO: 4833 - protein, 15 aa, Artificial Sequence
  Description of Artificial Sequence: Synthetic peptide
DRAYGDYVGWNGFDY

SEQ ID NO: 4834 - protein, 11 aa, Artificial Sequence
  Description of Artificial Sequence: Synthetic peptide
RASQSISSFLA

SEQ ID NO: 4835 - protein, 7 aa, Artificial Sequence
  Description of Artificial Sequence: Synthetic peptide
DASYRAT

SEQ ID NO: 4836 - protein, 9 aa, Artificial Sequence
  Description of Artificial Sequence: Synthetic peptide
QQRGNWPIT

SEQ ID NO: 4837 - protein, 5 aa, Artificial Sequence
  Description of Artificial Sequence: Synthetic peptide
WYPMT

SEQ ID NO: 4838 - protein, 17 aa, Artificial Sequence
  Description of Artificial Sequence: Synthetic peptide
YISPSGGYTGYADSVKG

SEQ ID NO: 4839 - protein, 15 aa, Artificial Sequence
  Description of Artificial Sequence: Synthetic peptide
DRAYGDYVGWNGFDY

SEQ ID NO: 4840 - protein, 11 aa, Artificial Sequence
  Description of Artificial Sequence: Synthetic peptide
RASQSISSFLA

SEQ ID NO: 4841 - protein, 7 aa, Artificial Sequence
  Description of Artificial Sequence: Synthetic peptide
DASYRAT

SEQ ID NO: 4842 - protein, 9 aa, Artificial Sequence
  Description of Artificial Sequence: Synthetic peptide
QQRGNWPIT

SEQ ID NO: 4843 - protein, 5 aa, Artificial Sequence
  Description of Artificial Sequence: Synthetic peptide
WYPMV

SEQ ID NO: 4844 - protein, 17 aa, Artificial Sequence
  Description of Artificial Sequence: Synthetic peptide
YIYPSGGGTFYADSVKG

SEQ ID NO: 4845 - protein, 15 aa, Artificial Sequence
  Description of Artificial Sequence: Synthetic peptide
DRAYGDYVGWNGFDY

SEQ ID NO: 4846 - protein, 11 aa, Artificial Sequence
  Description of Artificial Sequence: Synthetic peptide
RASQSISSFLA

SEQ ID NO: 4847 - protein, 7 aa, Artificial Sequence
  Description of Artificial Sequence: Synthetic peptide
DASYRAT

SEQ ID NO: 4848 - protein, 9 aa, Artificial Sequence
  Description of Artificial Sequence: Synthetic peptide
QQRGNWPIT

SEQ ID NO: 4849 - protein, 5 aa, Artificial Sequence
  Description of Artificial Sequence: Synthetic peptide
WYPMW

SEQ ID NO: 4850 - protein, 17 aa, Artificial Sequence
  Description of Artificial Sequence: Synthetic peptide
SISPSGGATYYADSVKG

SEQ ID NO: 4851 - protein, 15 aa, Artificial Sequence
  Description of Artificial Sequence: Synthetic peptide
DRAYGDYVGWNGFDY

SEQ ID NO: 4852 - protein, 11 aa, Artificial Sequence
  Description of Artificial Sequence: Synthetic peptide
RASQSISSFLA

SEQ ID NO: 4853 - protein, 7 aa, Artificial Sequence
  Description of Artificial Sequence: Synthetic peptide
DASYRAT

SEQ ID NO: 4854 - protein, 9 aa, Artificial Sequence
  Description of Artificial Sequence: Synthetic peptide
QQRGNWPIT

SEQ ID NO: 4855 - protein, 5 aa, Artificial Sequence
  Description of Artificial Sequence: Synthetic peptide
WYPMW

SEQ ID NO: 4856 - protein, 17 aa, Artificial Sequence
  Description of Artificial Sequence: Synthetic peptide
SIVPSGGATYYADSVKG

SEQ ID NO: 4857 - protein, 15 aa, Artificial Sequence
  Description of Artificial Sequence: Synthetic peptide
DRAYGDYVGWNGFDY

SEQ ID NO: 4858 - protein, 11 aa, Artificial Sequence
  Description of Artificial Sequence: Synthetic peptide
RASQSISSFLA

SEQ ID NO: 4859 - protein, 7 aa, Artificial Sequence
  Description of Artificial Sequence: Synthetic peptide
DASYRAT

SEQ ID NO: 4860 - protein, 9 aa, Artificial Sequence
  Description of Artificial Sequence: Synthetic peptide
QQRGNWPIT

SEQ ID NO: 4861 - protein, 5 aa, Artificial Sequence
  Description of Artificial Sequence: Synthetic peptide
WYPMW

SEQ ID NO: 4862 - protein, 17 aa, Artificial Sequence
  Description of Artificial Sequence: Synthetic peptide
VIYPSGGYTSYADSVKG

SEQ ID NO: 4863 - protein, 15 aa, Artificial Sequence
  Description of Artificial Sequence: Synthetic peptide
DRAYGDYVGWNGFDY

SEQ ID NO: 4864 - protein, 11 aa, Artificial Sequence
  Description of Artificial Sequence: Synthetic peptide
RASQSISSFLA

SEQ ID NO: 4865 - protein, 7 aa, Artificial Sequence
  Description of Artificial Sequence: Synthetic peptide
DASYRAT

SEQ ID NO: 4866 - protein, 9 aa, Artificial Sequence
  Description of Artificial Sequence: Synthetic peptide
QQRGNWPIT

SEQ ID NO: 4867 - protein, 5 aa, Artificial Sequence
  Description of Artificial Sequence: Synthetic peptide
WYPMW

SEQ ID NO: 4868 - protein, 17 aa, Artificial Sequence
  Description of Artificial Sequence: Synthetic peptide
VIYSSGGATFYADSVKG

SEQ ID NO: 4869 - protein, 15 aa, Artificial Sequence
  Description of Artificial Sequence: Synthetic peptide
DRAYGDYVGWNGFDY

SEQ ID NO: 4870 - protein, 11 aa, Artificial Sequence
  Description of Artificial Sequence: Synthetic peptide
RASQSISSFLA

SEQ ID NO: 4871 - protein, 7 aa, Artificial Sequence
  Description of Artificial Sequence: Synthetic peptide
DASYRAT

SEQ ID NO: 4872 - protein, 9 aa, Artificial Sequence
  Description of Artificial Sequence: Synthetic peptide
QQRGNWPIT

SEQ ID NO: 4873 - protein, 5 aa, Artificial Sequence
  Description of Artificial Sequence: Synthetic peptide
WYPMW

SEQ ID NO: 4874 - protein, 17 aa, Artificial Sequence
  Description of Artificial Sequence: Synthetic peptide
VIYSSGGYTGYADSVKG

SEQ ID NO: 4875 - protein, 15 aa, Artificial Sequence
  Description of Artificial Sequence: Synthetic peptide
DRAYGDYVGWNGFDY

SEQ ID NO: 4876 - protein, 11 aa, Artificial Sequence
  Description of Artificial Sequence: Synthetic peptide
RASQSISSFLA

SEQ ID NO: 4877 - protein, 7 aa, Artificial Sequence
  Description of Artificial Sequence: Synthetic peptide
DASYRAT

SEQ ID NO: 4878 - protein, 9 aa, Artificial Sequence
  Description of Artificial Sequence: Synthetic peptide
QQRGNWPIT

SEQ ID NO: 4879 - protein, 5 aa, Artificial Sequence
  Description of Artificial Sequence: Synthetic peptide
WYPMW

SEQ ID NO: 4880 - protein, 17 aa, Artificial Sequence
  Description of Artificial Sequence: Synthetic peptide
YIVPSGGATFYADSVKG

SEQ ID NO: 4881 - protein, 15 aa, Artificial Sequence
  Description of Artificial Sequence: Synthetic peptide
DRAYGDYVGWNGFDY

SEQ ID NO: 4882 - protein, 11 aa, Artificial Sequence
  Description of Artificial Sequence: Synthetic peptide
RASQSISSFLA

SEQ ID NO: 4883 - protein, 7 aa, Artificial Sequence
  Description of Artificial Sequence: Synthetic peptide
DASYRAT

SEQ ID NO: 4884 - protein, 9 aa, Artificial Sequence
  Description of Artificial Sequence: Synthetic peptide
QQRGNWPIT

SEQ ID NO: 4885 - protein, 5 aa, Artificial Sequence
  Description of Artificial Sequence: Synthetic peptide
WYPMW

SEQ ID NO: 4886 - protein, 17 aa, Artificial Sequence
  Description of Artificial Sequence: Synthetic peptide
YIVPSGGRTYYADSVKG

SEQ ID NO: 4887 - protein, 15 aa, Artificial Sequence
  Description of Artificial Sequence: Synthetic peptide
DRAYGDYVGWNGFDY

SEQ ID NO: 4888 - protein, 11 aa, Artificial Sequence
  Description of Artificial Sequence: Synthetic peptide
RASQSISSFLA

SEQ ID NO: 4889 - protein, 7 aa, Artificial Sequence
  Description of Artificial Sequence: Synthetic peptide
DASYRAT

SEQ ID NO: 4890 - protein, 9 aa, Artificial Sequence
  Description of Artificial Sequence: Synthetic peptide
QQRGNWPIT

SEQ ID NO: 4891 - protein, 5 aa, Artificial Sequence
  Description of Artificial Sequence: Synthetic peptide
WYSMW

SEQ ID NO: 4892 - protein, 17 aa, Artificial Sequence
  Description of Artificial Sequence: Synthetic peptide
VIYPSGGGTFYADSVKG

SEQ ID NO: 4893 - protein, 15 aa, Artificial Sequence
  Description of Artificial Sequence: Synthetic peptide
DRAYGDYVGWNGFDY

SEQ ID NO: 4894 - protein, 11 aa, Artificial Sequence
  Description of Artificial Sequence: Synthetic peptide
RASQSISSFLA

SEQ ID NO: 4895 - protein, 7 aa, Artificial Sequence
  Description of Artificial Sequence: Synthetic peptide
DASYRAT

SEQ ID NO: 4896 - protein, 9 aa, Artificial Sequence
  Description of Artificial Sequence: Synthetic peptide
QQRGNWPIT

SEQ ID NO: 4897 - protein, 5 aa, Artificial Sequence
  Description of Artificial Sequence: Synthetic peptide
WYTMW

SEQ ID NO: 4898 - protein, 17 aa, Artificial Sequence
  Description of Artificial Sequence: Synthetic peptide
SISPSGGGTYYADSVKG

SEQ ID NO: 4899 - protein, 15 aa, Artificial Sequence
  Description of Artificial Sequence: Synthetic peptide
DRAYGDYVGWNGFDY

SEQ ID NO: 4900 - protein, 11 aa, Artificial Sequence
  Description of Artificial Sequence: Synthetic peptide
RASQSISSFLA

SEQ ID NO: 4901 - protein, 7 aa, Artificial Sequence
  Description of Artificial Sequence: Synthetic peptide
DASYRAT

SEQ ID NO: 4902 - protein, 9 aa, Artificial Sequence
  Description of Artificial Sequence: Synthetic peptide
QQRGNWPIT

SEQ ID NO: 4903 - protein, 5 aa, Artificial Sequence
  Description of Artificial Sequence: Synthetic peptide
WYYMI

SEQ ID NO: 4904 - protein, 17 aa, Artificial Sequence
  Description of Artificial Sequence: Synthetic peptide
YISPSGGGTYYADSVKG

SEQ ID NO: 4905 - protein, 15 aa, Artificial Sequence
  Description of Artificial Sequence: Synthetic peptide
DRAYGDYVGWNGFDY

SEQ ID NO: 4906 - protein, 11 aa, Artificial Sequence
  Description of Artificial Sequence: Synthetic peptide
RASQSISSFLA

SEQ ID NO: 4907 - protein, 7 aa, Artificial Sequence
  Description of Artificial Sequence: Synthetic peptide
DASYRAT

SEQ ID NO: 4908 - protein, 9 aa, Artificial Sequence
  Description of Artificial Sequence: Synthetic peptide
QQRGNWPIT

SEQ ID NO: 4909 - protein, 5 aa, Artificial Sequence
  Description of Artificial Sequence: Synthetic peptide
YYDMI

SEQ ID NO: 4910 - protein, 17 aa, Artificial Sequence
  Description of Artificial Sequence: Synthetic peptide
WISPSGGLTMYADSVKG

SEQ ID NO: 4911 - protein, 15 aa, Artificial Sequence
  Description of Artificial Sequence: Synthetic peptide
DRAYGDYVGWNGFDY

SEQ ID NO: 4912 - protein, 11 aa, Artificial Sequence
  Description of Artificial Sequence: Synthetic peptide
RASQSISSFLA

SEQ ID NO: 4913 - protein, 7 aa, Artificial Sequence
  Description of Artificial Sequence: Synthetic peptide
DASYRAT

SEQ ID NO: 4914 - protein, 9 aa, Artificial Sequence
  Description of Artificial Sequence: Synthetic peptide
QQRGNWPIT

SEQ ID NO: 4915 - protein, 5 aa, Artificial Sequence
  Description of Artificial Sequence: Synthetic peptide
YYDMI

SEQ ID NO: 4916 - protein, 17 aa, Artificial Sequence
  Description of Artificial Sequence: Synthetic peptide
YIVPSGGYTSYADSVKG

SEQ ID NO: 4917 - protein, 15 aa, Artificial Sequence
  Description of Artificial Sequence: Synthetic peptide
DRAYGDYVGWNGFDY

SEQ ID NO: 4918 - protein, 11 aa, Artificial Sequence
  Description of Artificial Sequence: Synthetic peptide
RASQSISSFLA

SEQ ID NO: 4919 - protein, 7 aa, Artificial Sequence
  Description of Artificial Sequence: Synthetic peptide
DASYRAT

SEQ ID NO: 4920 - protein, 9 aa, Artificial Sequence
  Description of Artificial Sequence: Synthetic peptide
QQRGNWPIT

SEQ ID NO: 4921 - protein, 5 aa, Artificial Sequence
  Description of Artificial Sequence: Synthetic peptide
YYDMV

SEQ ID NO: 4922 - protein, 17 aa, Artificial Sequence
  Description of Artificial Sequence: Synthetic peptide
YISPSGGFTLYADSVKG

SEQ ID NO: 4923 - protein, 15 aa, Artificial Sequence
  Description of Artificial Sequence: Synthetic peptide
DRAYGDYVGWNGFDY

SEQ ID NO: 4924 - protein, 11 aa, Artificial Sequence
  Description of Artificial Sequence: Synthetic peptide
RASQSISSFLA

SEQ ID NO: 4925 - protein, 7 aa, Artificial Sequence
  Description of Artificial Sequence: Synthetic peptide
DASYRAT

SEQ ID NO: 4926 - protein, 9 aa, Artificial Sequence
  Description of Artificial Sequence: Synthetic peptide
QQRGNWPIT

SEQ ID NO: 4927 - protein, 5 aa, Artificial Sequence
  Description of Artificial Sequence: Synthetic peptide
YYDMW

SEQ ID NO: 4928 - protein, 17 aa, Artificial Sequence
  Description of Artificial Sequence: Synthetic peptide
SISPSGGFTGYADSVKG

SEQ ID NO: 4929 - protein, 15 aa, Artificial Sequence
  Description of Artificial Sequence: Synthetic peptide
DRAYGDYVGWNGFDY

SEQ ID NO: 4930 - protein, 11 aa, Artificial Sequence
  Description of Artificial Sequence: Synthetic peptide
RASQSISSFLA

SEQ ID NO: 4931 - protein, 7 aa, Artificial Sequence
  Description of Artificial Sequence: Synthetic peptide
DASYRAT

SEQ ID NO: 4932 - protein, 9 aa, Artificial Sequence
  Description of Artificial Sequence: Synthetic peptide
QQRGNWPIT

SEQ ID NO: 4933 - protein, 5 aa, Artificial Sequence
  Description of Artificial Sequence: Synthetic peptide
YYDMW

SEQ ID NO: 4934 - protein, 17 aa, Artificial Sequence
  Description of Artificial Sequence: Synthetic peptide
VISSSGGGTFYADSVKG

SEQ ID NO: 4935 - protein, 15 aa, Artificial Sequence
  Description of Artificial Sequence: Synthetic peptide
DRAYGDYVGWNGFDY

SEQ ID NO: 4936 - protein, 11 aa, Artificial Sequence
  Description of Artificial Sequence: Synthetic peptide
RASQSISSFLA

SEQ ID NO: 4937 - protein, 7 aa, Artificial Sequence
  Description of Artificial Sequence: Synthetic peptide
DASYRAT

SEQ ID NO: 4938 - protein, 9 aa, Artificial Sequence
  Description of Artificial Sequence: Synthetic peptide
QQRGNWPIT

SEQ ID NO: 4939 - protein, 5 aa, Artificial Sequence
  Description of Artificial Sequence: Synthetic peptide
YYDMW

SEQ ID NO: 4940 - protein, 17 aa, Artificial Sequence
  Description of Artificial Sequence: Synthetic peptide
VIYPSGGTTFYADSVKG

SEQ ID NO: 4941 - protein, 15 aa, Artificial Sequence
  Description of Artificial Sequence: Synthetic peptide
DRAYGDYVGWNGFDY

SEQ ID NO: 4942 - protein, 11 aa, Artificial Sequence
  Description of Artificial Sequence: Synthetic peptide
RASQSISSFLA

SEQ ID NO: 4943 - protein, 7 aa, Artificial Sequence
  Description of Artificial Sequence: Synthetic peptide
DASYRAT

SEQ ID NO: 4944 - protein, 9 aa, Artificial Sequence
  Description of Artificial Sequence: Synthetic peptide
QQRGNWPIT

SEQ ID NO: 4945 - protein, 5 aa, Artificial Sequence
  Description of Artificial Sequence: Synthetic peptide
YYDMW

SEQ ID NO: 4946 - protein, 17 aa, Artificial Sequence
  Description of Artificial Sequence: Synthetic peptide
VIYPSGGYTAYADSVKG

SEQ ID NO: 4947 - protein, 15 aa, Artificial Sequence
  Description of Artificial Sequence: Synthetic peptide
DRAYGDYVGWNGFDY

SEQ ID NO: 4948 - protein, 11 aa, Artificial Sequence
  Description of Artificial Sequence: Synthetic peptide
RASQSISSFLA

SEQ ID NO: 4949 - protein, 7 aa, Artificial Sequence
  Description of Artificial Sequence: Synthetic peptide
DASYRAT

SEQ ID NO: 4950 - protein, 9 aa, Artificial Sequence
  Description of Artificial Sequence: Synthetic peptide
QQRGNWPIT

SEQ ID NO: 4951 - protein, 5 aa, Artificial Sequence
  Description of Artificial Sequence: Synthetic peptide
YYDMW

SEQ ID NO: 4952 - protein, 17 aa, Artificial Sequence
  Description of Artificial Sequence: Synthetic peptide
YISSSGGGTYYADSVKG

SEQ ID NO: 4953 - protein, 15 aa, Artificial Sequence
  Description of Artificial Sequence: Synthetic peptide
DRAYGDYVGWNGFDY

SEQ ID NO: 4954 - protein, 11 aa, Artificial Sequence
  Description of Artificial Sequence: Synthetic peptide
RASQSISSFLA

SEQ ID NO: 4955 - protein, 7 aa, Artificial Sequence
  Description of Artificial Sequence: Synthetic peptide
DASYRAT

SEQ ID NO: 4956 - protein, 9 aa, Artificial Sequence
  Description of Artificial Sequence: Synthetic peptide
QQRGNWPIT

SEQ ID NO: 4957 - protein, 5 aa, Artificial Sequence
  Description of Artificial Sequence: Synthetic peptide
YYEMW

SEQ ID NO: 4958 - protein, 17 aa, Artificial Sequence
  Description of Artificial Sequence: Synthetic peptide
YISSSGGFTSYADSVKG

SEQ ID NO: 4959 - protein, 15 aa, Artificial Sequence
  Description of Artificial Sequence: Synthetic peptide
DRAYGDYVGWNGFDY

SEQ ID NO: 4960 - protein, 11 aa, Artificial Sequence
  Description of Artificial Sequence: Synthetic peptide
RASQSISSFLA

SEQ ID NO: 4961 - protein, 7 aa, Artificial Sequence
  Description of Artificial Sequence: Synthetic peptide
DASYRAT

SEQ ID NO: 4962 - protein, 9 aa, Artificial Sequence
  Description of Artificial Sequence: Synthetic peptide
QQRGNWPIT

SEQ ID NO: 4963 - protein, 5 aa, Artificial Sequence
  Description of Artificial Sequence: Synthetic peptide
YYGMW

SEQ ID NO: 4964 - protein, 17 aa, Artificial Sequence
  Description of Artificial Sequence: Synthetic peptide
VISPSGGGTFYADSVKG

SEQ ID NO: 4965 - protein, 15 aa, Artificial Sequence
  Description of Artificial Sequence: Synthetic peptide
DRAYGDYVGWNGFDY

SEQ ID NO: 4966 - protein, 11 aa, Artificial Sequence
  Description of Artificial Sequence: Synthetic peptide
RASQSISSFLA

SEQ ID NO: 4967 - protein, 7 aa, Artificial Sequence
  Description of Artificial Sequence: Synthetic peptide
DASYRAT

SEQ ID NO: 4968 - protein, 9 aa, Artificial Sequence
  Description of Artificial Sequence: Synthetic peptide
QQRGNWPIT

SEQ ID NO: 4969 - protein, 5 aa, Artificial Sequence
  Description of Artificial Sequence: Synthetic peptide
YYMMI

SEQ ID NO: 4970 - protein, 17 aa, Artificial Sequence
  Description of Artificial Sequence: Synthetic peptide
GIVSSGGFTMYADSVKG

SEQ ID NO: 4971 - protein, 15 aa, Artificial Sequence
  Description of Artificial Sequence: Synthetic peptide
DRAYGDYVGWNGFDY

SEQ ID NO: 4972 - protein, 11 aa, Artificial Sequence
  Description of Artificial Sequence: Synthetic peptide
RASQSISSFLA

SEQ ID NO: 4973 - protein, 7 aa, Artificial Sequence
  Description of Artificial Sequence: Synthetic peptide
DASYRAT

SEQ ID NO: 4974 - protein, 9 aa, Artificial Sequence
  Description of Artificial Sequence: Synthetic peptide
QQRGNWPIT

SEQ ID NO: 4975 - protein, 5 aa, Artificial Sequence
  Description of Artificial Sequence: Synthetic peptide
YYMMW

SEQ ID NO: 4976 - protein, 17 aa, Artificial Sequence
  Description of Artificial Sequence: Synthetic peptide
SISSSGGGTFYADSVKG

SEQ ID NO: 4977 - protein, 15 aa, Artificial Sequence
  Description of Artificial Sequence: Synthetic peptide
DRAYGDYVGWNGFDY

SEQ ID NO: 4978 - protein, 11 aa, Artificial Sequence
  Description of Artificial Sequence: Synthetic peptide
RASQSISSFLA

SEQ ID NO: 4979 - protein, 7 aa, Artificial Sequence
  Description of Artificial Sequence: Synthetic peptide
DASYRAT

SEQ ID NO: 4980 - protein, 9 aa, Artificial Sequence
  Description of Artificial Sequence: Synthetic peptide
QQRGNWPIT

SEQ ID NO: 4981 - protein, 5 aa, Artificial Sequence
  Description of Artificial Sequence: Synthetic peptide
YYMMW

SEQ ID NO: 4982 - protein, 17 aa, Artificial Sequence
  Description of Artificial Sequence: Synthetic peptide
SIYSSGGATFYADSVKG

SEQ ID NO: 4983 - protein, 15 aa, Artificial Sequence
  Description of Artificial Sequence: Synthetic peptide
DRAYGDYVGWNGFDY

SEQ ID NO: 4984 - protein, 11 aa, Artificial Sequence
  Description of Artificial Sequence: Synthetic peptide
RASQSISSFLA

SEQ ID NO: 4985 - protein, 7 aa, Artificial Sequence
  Description of Artificial Sequence: Synthetic peptide
DASYRAT

SEQ ID NO: 4986 - protein, 9 aa, Artificial Sequence
  Description of Artificial Sequence: Synthetic peptide
QQRGNWPIT

SEQ ID NO: 4987 - protein, 5 aa, Artificial Sequence
  Description of Artificial Sequence: Synthetic peptide
YYNMW

SEQ ID NO: 4988 - protein, 17 aa, Artificial Sequence
  Description of Artificial Sequence: Synthetic peptide
SISPSGGGTYYADSVKG

SEQ ID NO: 4989 - protein, 15 aa, Artificial Sequence
  Description of Artificial Sequence: Synthetic peptide
DRAYGDYVGWNGFDY

SEQ ID NO: 4990 - protein, 11 aa, Artificial Sequence
  Description of Artificial Sequence: Synthetic peptide
RASQSISSFLA

SEQ ID NO: 4991 - protein, 7 aa, Artificial Sequence
  Description of Artificial Sequence: Synthetic peptide
DASYRAT

SEQ ID NO: 4992 - protein, 9 aa, Artificial Sequence
  Description of Artificial Sequence: Synthetic peptide
QQRGNWPIT

SEQ ID NO: 4993 - protein, 5 aa, Artificial Sequence
  Description of Artificial Sequence: Synthetic peptide
YYPMF

SEQ ID NO: 4994 - protein, 17 aa, Artificial Sequence
  Description of Artificial Sequence: Synthetic peptide
YISPSGGWTDYADSVKG

SEQ ID NO: 4995 - protein, 15 aa, Artificial Sequence
  Description of Artificial Sequence: Synthetic peptide
DRAYGDYVGWNGFDY

SEQ ID NO: 4996 - protein, 11 aa, Artificial Sequence
  Description of Artificial Sequence: Synthetic peptide
RASQSISSFLA

SEQ ID NO: 4997 - protein, 7 aa, Artificial Sequence
  Description of Artificial Sequence: Synthetic peptide
DASYRAT

SEQ ID NO: 4998 - protein, 9 aa, Artificial Sequence
  Description of Artificial Sequence: Synthetic peptide
QQRGNWPIT

SEQ ID NO: 4999 - protein, 5 aa, Artificial Sequence
  Description of Artificial Sequence: Synthetic peptide
YYPMI

SEQ ID NO: 5000 - protein, 17 aa, Artificial Sequence
  Description of Artificial Sequence: Synthetic peptide
WISPSGGGTQYADSVKG

SEQ ID NO: 5001 - protein, 15 aa, Artificial Sequence
  Description of Artificial Sequence: Synthetic peptide
DRAYGDYVGWNGFDY

SEQ ID NO: 5002 - protein, 11 aa, Artificial Sequence
  Description of Artificial Sequence: Synthetic peptide
RASQSISSFLA

SEQ ID NO: 5003 - protein, 7 aa, Artificial Sequence
  Description of Artificial Sequence: Synthetic peptide
DASYRAT

SEQ ID NO: 5004 - protein, 9 aa, Artificial Sequence
  Description of Artificial Sequence: Synthetic peptide
QQRGNWPIT

SEQ ID NO: 5005 - protein, 5 aa, Artificial Sequence
  Description of Artificial Sequence: Synthetic peptide
YYPMV

SEQ ID NO: 5006 - protein, 16 aa, Artificial Sequence
  Description of Artificial Sequence: Synthetic peptide
YIWPSGGTYYADSVKG

SEQ ID NO: 5007 - protein, 15 aa, Artificial Sequence
  Description of Artificial Sequence: Synthetic peptide
DRAYGDYVGWNGFDY

SEQ ID NO: 5008 - protein, 11 aa, Artificial Sequence
  Description of Artificial Sequence: Synthetic peptide
RASQSISSFLA

SEQ ID NO: 5009 - protein, 7 aa, Artificial Sequence
  Description of Artificial Sequence: Synthetic peptide
DASYRAT

SEQ ID NO: 5010 - protein, 9 aa, Artificial Sequence
  Description of Artificial Sequence: Synthetic peptide
QQRGNWPIT

SEQ ID NO: 5011 - protein, 5 aa, Artificial Sequence
  Description of Artificial Sequence: Synthetic peptide
YYPMW

SEQ ID NO: 5012 - protein, 17 aa, Artificial Sequence
  Description of Artificial Sequence: Synthetic peptide
SIVPSGGATFYADSVKG

SEQ ID NO: 5013 - protein, 15 aa, Artificial Sequence
  Description of Artificial Sequence: Synthetic peptide
DRAYGDYVGWNGFDY

SEQ ID NO: 5014 - protein, 11 aa, Artificial Sequence
  Description of Artificial Sequence: Synthetic peptide
RASQSISSFLA

SEQ ID NO: 5015 - protein, 7 aa, Artificial Sequence
  Description of Artificial Sequence: Synthetic peptide
DASYRAT

SEQ ID NO: 5016 - protein, 9 aa, Artificial Sequence
  Description of Artificial Sequence: Synthetic peptide
QQRGNWPIT

SEQ ID NO: 5017 - protein, 5 aa, Artificial Sequence
  Description of Artificial Sequence: Synthetic peptide
YYPMW

SEQ ID NO: 5018 - protein, 17 aa, Artificial Sequence
  Description of Artificial Sequence: Synthetic peptide
VIYPSGGATFYADSVKG

SEQ ID NO: 5019 - protein, 15 aa, Artificial Sequence
  Description of Artificial Sequence: Synthetic peptide
DRAYGDYVGWNGFDY

SEQ ID NO: 5020 - protein, 11 aa, Artificial Sequence
  Description of Artificial Sequence: Synthetic peptide
RASQSISSFLA

SEQ ID NO: 5021 - protein, 7 aa, Artificial Sequence
  Description of Artificial Sequence: Synthetic peptide
DASYRAT

SEQ ID NO: 5022 - protein, 9 aa, Artificial Sequence
  Description of Artificial Sequence: Synthetic peptide
QQRGNWPIT

SEQ ID NO: 5023 - protein, 5 aa, Artificial Sequence
  Description of Artificial Sequence: Synthetic peptide
YYPMW

SEQ ID NO: 5024 - protein, 17 aa, Artificial Sequence
  Description of Artificial Sequence: Synthetic peptide
YISSSGGGTHYADSVKG

SEQ ID NO: 5025 - protein, 15 aa, Artificial Sequence
  Description of Artificial Sequence: Synthetic peptide
DRAYGDYVGWNGFDY

SEQ ID NO: 5026 - protein, 11 aa, Artificial Sequence
  Description of Artificial Sequence: Synthetic peptide
RASQSISSFLA

SEQ ID NO: 5027 - protein, 7 aa, Artificial Sequence
  Description of Artificial Sequence: Synthetic peptide
DASYRAT

SEQ ID NO: 5028 - protein, 9 aa, Artificial Sequence
  Description of Artificial Sequence: Synthetic peptide
QQRGNWPIT

SEQ ID NO: 5029 - protein, 5 aa, Artificial Sequence
  Description of Artificial Sequence: Synthetic peptide
YYPMW

SEQ ID NO: 5030 - protein, 17 aa, Artificial Sequence
  Description of Artificial Sequence: Synthetic peptide
YIVPSGGATFYADSVKG

SEQ ID NO: 5031 - protein, 15 aa, Artificial Sequence
  Description of Artificial Sequence: Synthetic peptide
DRAYGDYVGWNGFDY

SEQ ID NO: 5032 - protein, 108 aa, Artificial Sequence
  Description of Artificial Sequence: Synthetic polypeptide
QDIQMTQSPSSLSASVGDRVTITCRASQGIRNDLDWYQQKPGTAPKRLIYSASNLQSGVPSRFSGSGSGTEFTLTISNLQPEDLATYFCLQHNSFPLTFGQGTKVEIK

SEQ ID NO: 5033 - protein, 116 aa, Artificial Sequence
  Description of Artificial Sequence: Synthetic polypeptide
EVQLLESGGGLVQPGGSLRLSCAASGFTFSLYRMNWVRQAPGKGLEWVSYIGSSGGATAYADSVKGRFTISRDNSKNTLYLQMNSLRAEDTAVYYCARGAWYLDSWGQGTLVTVSS

SEQ ID NO: 5034 - protein, 109 aa, Artificial Sequence
  Description of Artificial Sequence: Synthetic polypeptide
QDIQMTQSPGTLSVSPGERATLSCRASQSVSSDLAWYQHKPGQAPRLLIYGVSTKATGVPARFSGSGSGTEFTLTISSLQSEDLAVYYCQQYHNWPPLTFGGGTKVEIK

SEQ ID NO: 5035 - protein, 118 aa, Artificial Sequence
  Description of Artificial Sequence: Synthetic polypeptide
EVQLLESGGGLVQPGGSLRLSCAASGFTFSSYTMEWVRQAPGKGLEWVSWISPSGGYTFYADSVKGRFTISRDNSKNTLYLQMNSLRAEDTALYYCARGYSYGSIDLWGRGTLVTVSS

SEQ ID NO: 5036 - protein, 115 aa, Artificial Sequence
  Description of Artificial Sequence: Synthetic polypeptide
EIVLTQSPATLSLSPGERATLSCRASQSISSFLAWYQQKPGQAPRLLIYDASYRATGIPARFSGSGSGTDFTLTISSLEPEDFAVYYCQQRGNWPITFGQGTRLEIKRTVAAPSV

SEQ ID NO: 5037 - protein, 129 aa, Artificial Sequence
  Description of Artificial Sequence: Synthetic polypeptide
EVQLLESGGGLVQPGGSLRLSCAASGFTFSQYPMWWVRQAPGKGLEWVSYIVPSGGRTYYADSVKGRFTISRDNSKNTLYLQMNSLRAEDTAVYYCAKDRAYGDYVGWNGFDYWGQGTLVTVSSASTKG

SEQ ID NO: 5038 - protein, 115 aa, Artificial Sequence
  Description of Artificial Sequence: Synthetic polypeptide
QDIQMTQSPATLSLSPGERATLSCRASQSISSFLAWYQQKPGQAPRLLIYDASYRATGIPARFSGSGSGTDFTLTISSLEPEDYAVYYCQQRGNWPITFGQGTRLEIKRTVAAPS

SEQ ID NO: 5039 - protein, 140 aa, Artificial Sequence
  Description of Artificial Sequence: Synthetic polypeptide
EVQLLESGGGLVQPGGSLRLSCAASGFTFSQYDMWWVRQAPGKGLEWVSVIYPSGTTFYADSVKGRFTISRDNSKNTLYLQMNSLRAEDTAVYYCAKDRAYGDYVGWNGFDYWGQGTLVTVSSASTKGPSVFPLAPSSKS

SEQ ID NO: 5040 - protein, 115 aa, Artificial Sequence; identical to SEQ ID NO: 5038
  Description of Artificial Sequence: Synthetic polypeptide

SEQ ID NO: 5041 - protein, 141 aa, Artificial Sequence
  Description of Artificial Sequence: Synthetic polypeptide
EVQLLESGGGLVQPGGSLRLSCAASGFTFSHYDMWWVRQAPGKGLEWVSVIYPSGGPTYYADSVKGRFTISRDNSKNTLYLQMNSLRAEDTAVYYCAKDRAYGDYVGWNGFDYWGQGTLVTVSSASTKGPSVFPLAPSSKS

SEQ ID NO: 5042 - protein, 115 aa, Artificial Sequence; identical to SEQ ID NO: 5038
  Description of Artificial Sequence: Synthetic polypeptide

SEQ ID NO: 5043 - protein, 141 aa, Artificial Sequence
  Description of Artificial Sequence: Synthetic polypeptide
EVQLLESGGGLVQPGGSLRLSCAASGFTFSFYPMWWVRQAPGKGLEWVSYIYPSGGATFYADSVKGRFTISRDNSKNTLYLQMNSLRAEDTAVYYCAKDRAYGDYVGWNGFDYWGQGTLVTVSSASTKGPSVFPLAPSSKS

SEQ ID NO: 5044 - protein, 115 aa, Artificial Sequence; identical to SEQ ID NO: 5038
  Description of Artificial Sequence: Synthetic polypeptide

SEQ ID NO: 5045 - protein, 141 aa, Artificial Sequence
  Description of Artificial Sequence: Synthetic polypeptide
EVQLLESGGGLVQPGGSLRLSCAASGFTFSRYDMWWVRQAPGKGLEWVSVISPSGGATFYADSVKGRFTISRDNSKNTLYLQMNSLRAEDTAVYYCAKDRAYGDYVGWNGFDYWGQGTLVTVSSASTKGPSVFPLAPSSKS

SEQ ID NO: 5046 - protein, 115 aa, Artificial Sequence; identical to SEQ ID NO: 5038
  Description of Artificial Sequence: Synthetic polypeptide

SEQ ID NO: 5047 - protein, 141 aa, Artificial Sequence
  Description of Artificial Sequence: Synthetic polypeptide
EVQLLESGGGLVQPGGSLRLSCAASGFTFSWYDMWWVRQAPGKGLEWVSVIYSSGGPTFYADSVKGRFTISRDNSKNTLYLQMNSLRAEDTAVYYCAKDRAYGDYVGWNGFDYWGQGTLVTVSSASTKGPSVFPLAPSSKS

SEQ ID NO: 5048 - protein, 115 aa, Artificial Sequence; identical to SEQ ID NO: 5038
  Description of Artificial Sequence: Synthetic polypeptide

SEQ ID NO: 5049 - protein, 141 aa, Artificial Sequence
  Description of Artificial Sequence: Synthetic polypeptide
EVQLLESGGGLVQPGGSLRLSCAASGFTFSHYDMWWVRQAPGKGLEWVSVIYSSGGFTGYADSVKGRFTISRDNSKNTLYLQMNSLRAEDTAVYYCAKDRAYGDYVGWNGFDYWGQGTLVTVSSASTKGPSVFPLAPSSKS

SEQ ID NO: 5050 - protein, 115 aa, Artificial Sequence; identical to SEQ ID NO: 5038
  Description of Artificial Sequence: Synthetic polypeptide

SEQ ID NO: 5051 - protein, 141 aa, Artificial Sequence
  Description of Artificial Sequence: Synthetic polypeptide
EVQLLESGGGLVQPGGSLRLSCAASGFTFSVYDMWWVRQAPGKGLEWVSVIYPSGGATYYADSVKGRFTISRDNSKNTLYLQMNSLRAEDTAVYYCAKDRAYGDYVGWNGFDYWGQGTLVTVSSASTKGPSVFPLAPSSKS

SEQ ID NO: 5052 - protein, 115 aa, Artificial Sequence; identical to SEQ ID NO: 5038
  Description of Artificial Sequence: Synthetic polypeptide

SEQ ID NO: 5053 - protein, 141 aa, Artificial Sequence
  Description of Artificial Sequence: Synthetic polypeptide
EVQLLESGGGLVQPGGSLRLSCAASGFTFSAYDMWWVRQAPGKGLEWVSVIYPSGGTTFYADSVKGRFTISRDNSKNTLYLQMNSLRAEDTAVYYCAKDRAYGDYVGWNGFDYWGQGTLVTVSSASTKGPSVFPLAPSSKS

SEQ ID NO: 5054 - protein, 115 aa, Artificial Sequence; identical to SEQ ID NO: 5038
  Description of Artificial Sequence: Synthetic polypeptide

SEQ ID NO: 5055 - protein, 141 aa, Artificial Sequence
  Description of Artificial Sequence: Synthetic polypeptide
EVQLLESGGGLVQPGGSLRLSCAASGFTFSKYAMIWVRQAPGKGLEWVSWIPPSGGYTSYADSVKGRFTISRDNSKNTLYLQMNSLRAEDTAVYYCAKDRAYGDYVGWNGFDYWGQGTLVTVSSASTKGPSVFPLAPSSKS

SEQ ID NO: 5056 - protein, 115 aa, Artificial Sequence; identical to SEQ ID NO: 5038
  Description of Artificial Sequence: Synthetic polypeptide

SEQ ID NO: 5057 - protein, 141 aa, Artificial Sequence
  Description of Artificial Sequence: Synthetic polypeptide
EVQLLESGGGLVQPGGSLRLSCAASGFTFSMYDMWWVRQAPGKGLEWVSVIYSSGGYTSYADSVKGRFTISRDNSKNTLYLQMNSLRAEDTAVYYCAKDRAYGDYVGWNGFDYWGQGTLVTVSSASTKGPSVFPLAPSSKS

SEQ ID NO: 5058 - protein, 115 aa, Artificial Sequence; identical to SEQ ID NO: 5038
  Description of Artificial Sequence: Synthetic polypeptide

SEQ ID NO: 5059 - protein, 141 aa, Artificial Sequence
  Description of Artificial Sequence: Synthetic polypeptide
EVQLLESGGGLVQPGGSLRLSCAASGFTFSLYDMWWVRQAPGKGLEWVSVIYSSGGYTGYADSVKGRFTISRDNSKNTLYLQMNSLRAEDTAVYYCAKDRAYGDYVGWNGFDYWGQGTLVTVSSASTKGPSVFPLAPSSKS

SEQ ID NO: 5060 - protein, 115 aa, Artificial Sequence; identical to SEQ ID NO: 5038
  Description of Artificial Sequence: Synthetic polypeptide

SEQ ID NO: 5061 - protein, 141 aa, Artificial Sequence
  Description of Artificial Sequence: Synthetic polypeptide
EVQLLESGGGLVQPGGSLRLSCAASGFTFSHYPMWWVRQAPGKGLEWVSYISSSGGGTFYADSVKGRFTISRDNSKNTLYLQMNSLRAEDTAVYYCAKDRAYGDYVGWNGFDYWGQGTLVTVSSASTKGPSVFPLAPSSKS

SEQ ID NO: 5062 - protein, 115 aa, Artificial Sequence; identical to SEQ ID NO: 5038
  Description of Artificial Sequence: Synthetic polypeptide

SEQ ID NO: 5063 - protein, 141 aa, Artificial Sequence
  Description of Artificial Sequence: Synthetic polypeptide
EVQLLESGGGLVQPGGSLRLSCAASGFTFSYYDMWWVRQAPGKGLEWVSVIYPSGGYTAYADSVKGRFTISRDNSKNTLYLQMNSLRAEDTAVYYCAKDRAYGDYVGWNGFDYWGQGTLVTVSSASTKGPSVFPLAPSSKS

SEQ ID NO: 5064 - protein, 115 aa, Artificial Sequence; identical to SEQ ID NO: 5038
  Description of Artificial Sequence: Synthetic polypeptide

SEQ ID NO: 5065 - protein, 141 aa, Artificial Sequence
  Description of Artificial Sequence: Synthetic polypeptide
EVQLLESGGGLVQPGGSLRLSCAASGFTFSHYDMWWVRQAPGKGLEWVSVIYSSGGPTFYADSVKGRFTISRDNSKNTLYLQMNSLRAEDTAVYYCAKDRAYGDYVGWNGFDYWGQGTLVTVSSASTKGPSVFPLAPSSKS

SEQ ID NO: 5066 - protein, 115 aa, Artificial Sequence; identical to SEQ ID NO: 5038
  Description of Artificial Sequence: Synthetic polypeptide

SEQ ID NO: 5067 - protein, 124 aa, Artificial Sequence; identical to SEQ ID NO: 879
  Description of Artificial Sequence: Synthetic polypeptide

SEQ ID NO: 5068 - protein, 115 aa, Artificial Sequence
  Description of Artificial Sequence: Synthetic polypeptide
QDIQMTQSPAALSLSPGERATLSCRASQSVSSDLAWYQQKPGQAPRLLIYGASTRATGIPARFSGSRSGTAFTLTISSLEPEDFAVYYCQQRSNWPVTFGQGTKLEIKRTVAAPS

SEQ ID NO: 5069 - protein, 124 aa, Artificial Sequence; identical to SEQ ID NO: 7
  Description of Artificial Sequence: Synthetic polypeptide

SEQ ID NO: 5070 - protein, 115 aa, Artificial Sequence; identical to SEQ ID NO: 5038
  Description of Artificial Sequence: Synthetic polypeptide

SEQ ID NO: 5071 - protein, 124 aa, Artificial Sequence; identical to SEQ ID NO: 721
  Description of Artificial Sequence: Synthetic polypeptide

SEQ ID NO: 5072 - protein, 43 aa, Artificial Sequence
  Description of Artificial Sequence: Synthetic polypeptide
SGFTFSQYPMWWVRQAPGKGLEWVSYIVPSGGRTYYADSVKGR

SEQ ID NO: 5073 - protein, 43 aa, Homo sapiens
SGFTFSSYAMSWVRQAPGKGLEWVSAISGSGGSTYYADSVKGR

SEQ ID NO: 5074 - protein, 43 aa, Artificial Sequence
  Description of Artificial Sequence: Synthetic polypeptide
SGFTFSVYPMIWVRQAPGKGLEWVSYISPSGGFTGYADSVKGR

SEQ ID NO: 5075 - protein, 43 aa, Artificial Sequence
  Description of Artificial Sequence: Synthetic polypeptide
SGFTFSDYPMWWVRQAPGKGLEWVSVIYPSGGATFYADSVKGR

SEQ ID NO: 5076 - protein, 43 aa, Artificial Sequence
  Description of Artificial Sequence: Synthetic polypeptide
SGFTFSTYPMIWVRQAPGKGLEWVSYISPSGGYTGYADSVKGR

SEQ ID NO: 5077 - protein, 43 aa, Artificial Sequence
  Description of Artificial Sequence: Synthetic polypeptide
SGFTFSHYDMWWVRQAPGKGLEWVSVIYSSGGPTFYADSVKGR

SEQ ID NO: 5078 - protein, 43 aa, Artificial Sequence
  Description of Artificial Sequence: Synthetic polypeptide
SGFTFSHYPMWWVRQAPGKGLEWVSSISPSGGATYYADSVKGR

SEQ ID NO: 5079 - protein, 43 aa, Artificial Sequence
  Description of Artificial Sequence: Synthetic polypeptide
SGFTFSKYPMWWVRQAPGKGLEWVSSIYPSGGATFYADSVKGR

SEQ ID NO: 5080 - protein, 43 aa, Artificial Sequence
  Description of Artificial Sequence: Synthetic polypeptide
SGFTFSHYDMLWVRQAPGKGLEWVSYISSSGGYTGYADSVKGR

SEQ ID NO: 5081 - protein, 43 aa, Artificial Sequence
  Description of Artificial Sequence: Synthetic polypeptide
SGFTFSKYPMWWVRQAPGKGLEWVSYISSSGGGTFYADSVKGR

SEQ ID NO: 5082 - protein, 43 aa, Artificial Sequence
  Description of Artificial Sequence: Synthetic polypeptide
SGFTFSLYDMWWVRQAPGKGLEWVSYISSSGGATFYADSVKGR

SEQ ID NO: 5083 - protein, 43 aa, Artificial Sequence
  Description of Artificial Sequence: Synthetic polypeptide
SGFTFSRYPMWWVRQAPGKGLEWVSYISPSGGFTSYADSVKGR

SEQ ID NO: 5084 - protein, 43 aa, Artificial Sequence
  Description of Artificial Sequence: Synthetic polypeptide
SGFTFSTYPMWWVRQAPGKGLEWVSYISSSGGGTYYADSVKGR

SEQ ID NO: 5085 - protein, 43 aa, Artificial Sequence
  Description of Artificial Sequence: Synthetic polypeptide
SGFTFSAYDMIWVRQAPGKGLEWVSYIVPSGGFTDYADSVKGR

SEQ ID NO: 5086 - protein, 43 aa, Artificial Sequence
  Description of Artificial Sequence: Synthetic polypeptide
SGFTFSAYDMWWVRQAPGKGLEWVSVIYPSGGTTFYADSVKGR

SEQ ID NO: 5087 - protein, 43 aa, Artificial Sequence
  Description of Artificial Sequence: Synthetic polypeptide
SGFTFSAYDMWWVRQAPGKGLEWVSVIYSSGGMTLYADSVKGR

SEQ ID NO: 5088 - protein, 43 aa, Artificial Sequence
  Description of Artificial Sequence: Synthetic polypeptide
SGFTFSAYDMWWVRQAPGKGLEWVSYISSSGGFTDYADSVKGR

SEQ ID NO: 5089 - protein, 43 aa, Artificial Sequence
  Description of Artificial Sequence: Synthetic polypeptide
SGFTFSAYEMWWVRQAPGKGLEWVSSIYPSGGYTDYADSVKGR

SEQ ID NO: 5090 - protein, 43 aa, Artificial Sequence
  Description of Artificial Sequence: Synthetic polypeptide
SGFTFSAYEMWWVRQAPGKGLEWVSVIYPSGGGTFYADSVKGR

SEQ ID NO: 5091 - protein, 43 aa, Artificial Sequence
  Description of Artificial Sequence: Synthetic polypeptide
SGFTFSAYMMWWVRQAPGKGLEWVSAISPSGGYTGYADSVKGR

SEQ ID NO: 5092 - protein, 43 aa, Artificial Sequence
  Description of Artificial Sequence: Synthetic polypeptide
SGFTFSAYNMIWVRQAPGKGLEWVSYIVPSGGFTGYADSVKGR

SEQ ID NO: 5093 - protein, 43 aa, Artificial Sequence
  Description of Artificial Sequence: Synthetic polypeptide
SGFTFSAYPMIWVRQAPGKGLEWVSYIVPSGGATFYADSVKGR

SEQ ID NO: 5094 - protein, 43 aa, Artificial Sequence
  Description of Artificial Sequence: Synthetic polypeptide
SGFTFSAYPMMWVRQAPGKGLEWVSYIYPSGGGTFYADSVKGR

SEQ ID NO: 5095 - protein, 43 aa, Artificial Sequence
  Description of Artificial Sequence: Synthetic polypeptide
SGFTFSAYPMWWVRQAPGKGLEWVSYIVPSGGMTYYADSVKGR

SEQ ID NO: 5096 - protein, 43 aa, Artificial Sequence
  Description of Artificial Sequence: Synthetic polypeptide
SGFTFSAYPMWWVRQAPGKGLEWVSYIYPSGGATFYADSVKGR

SEQ ID NO: 5097 - protein, 43 aa, Artificial Sequence
  Description of Artificial Sequence: Synthetic polypeptide
SGFTFSDYAMWWVRQAPGKGLEWVSSIYPSGGATFYADSVKGR

SEQ ID NO: 5098 - protein, 43 aa, Artificial Sequence
  Description of Artificial Sequence: Synthetic polypeptide
SGFTFSDYAMWWVRQAPGKGLEWVSWISPSGGGTLYADSVKGR

SEQ ID NO: 5099 - protein, 43 aa, Artificial Sequence
  Description of Artificial Sequence: Synthetic polypeptide
SGFTFSDYDMFWVRQAPGKGLEWVSGIVSSGGYTGYADSVKGR

SEQ ID NO: 5100 - protein, 43 aa, Artificial Sequence
  Description of Artificial Sequence: Synthetic polypeptide
SGFTFSDYDMWWVRQAPGKGLEWVSVISPSGGYTGYADSVKGR

SEQ ID NO: 5101 - protein, 43 aa, Artificial Sequence
  Description of Artificial Sequence: Synthetic polypeptide
SGFTFSDYDMWWVRQAPGKGLEWVSVIYPSGGFTGYADSVKGR

SEQ ID NO: 5102 - protein, 42 aa, Artificial Sequence
  Description of Artificial Sequence: Synthetic polypeptide
SGFTFSDYDMWWVRQAPGKGLEWVSVIYSGGSTYYADSVKGR

SEQ ID NO: 5103 - protein, 43 aa, Artificial Sequence
  Description of Artificial Sequence: Synthetic polypeptide
SGFTFSDYDMWWVRQAPGKGLEWVSVIYSSGGFTSYADSVKGR

SEQ ID NO: 5104 - protein, 43 aa, Artificial Sequence
  Description of Artificial Sequence: Synthetic polypeptide
SGFTFSDYDMWWVRQAPGKGLEWVSVIYSSGGMTYYADSVKGR

SEQ ID NO: 5105 - protein, 43 aa, Artificial Sequence
  Description of Artificial Sequence: Synthetic polypeptide
SGFTFSDYMMWWVRQAPGKGLEWVSSISPSGGFTDYADSVKGR

SEQ ID NO: 5106 - protein, 43 aa, Artificial Sequence
  Description of Artificial Sequence: Synthetic polypeptide
SGFTFSDYNMWWVRQAPGKGLEWVSVIYPSGGWTMYADSVKGR

SEQ ID NO: 5107 - protein, 43 aa, Artificial Sequence
  Description of Artificial Sequence: Synthetic polypeptide
SGFTFSDYPMFWVRQAPGKGLEWVSYIVPSGGWTDYADSVKGR

SEQ ID NO: 5108 - protein, 43 aa, Artificial Sequence
  Description of Artificial Sequence: Synthetic polypeptide
SGFTFSDYPMFWVRQAPGKGLEWVSYIVPSGGWTSYADSVKGR

SEQ ID NO: 5109 - protein, 43 aa, Artificial Sequence
  Description of Artificial Sequence: Synthetic polypeptide
SGFTFSDYPMIWVRQAPGKGLEWVSYISPSGGYTDYADSVKGR

SEQ ID NO: 5110 - protein, 43 aa, Artificial Sequence
  Description of Artificial Sequence: Synthetic polypeptide
SGFTFSDYPMIWVRQAPGKGLEWVSYIVPSGGWTDYADSVKGR

SEQ ID NO: 5111 - protein, 43 aa, Artificial Sequence
  Description of Artificial Sequence: Synthetic polypeptide
SGFTFSDYPMIWVRQAPGKGLEWVSYIYPSGGGTYYADSVKGR

SEQ ID NO: 5112 - protein, 43 aa, Artificial Sequence
  Description of Artificial Sequence: Synthetic polypeptide
SGFTFSDYPMWWVRQAPGKGLEWVSYISSSGGWTSYADSVKGR

SEQ ID NO: 5113 - protein, 43 aa, Artificial Sequence
  Description of Artificial Sequence: Synthetic polypeptide
SGFTFSDYPMWWVRQAPGKGLEWVSYIYPSGGATYYADSVKGR

SEQ ID NO: 5114 - protein, 43 aa, Artificial Sequence
  Description of Artificial Sequence: Synthetic polypeptide
SGFTFSDYQMWWVRQAPGKGLEWVSVIYPSGGATFYADSVKGR

SEQ ID NO: 5115 - protein, 43 aa, Artificial Sequence
  Description of Artificial Sequence: Synthetic polypeptide
SGFTFSEYDMWWVRQAPGKGLEWVSVIYPSGGPTYYADSVKGR

SEQ ID NO: 5116 - protein, 43 aa, Artificial Sequence
  Description of Artificial Sequence: Synthetic polypeptide
SGFTFSEYDMWWVRQAPGKGLEWVSVIYSSGGYTGYADSVKGR

SEQ ID NO: 5117 - protein, 43 aa, Artificial Sequence
  Description of Artificial Sequence: Synthetic polypeptide
SGFTFSEYEMWWVRQAPGKGLEWVSVIYPSGGYTNYADSVKGR

SEQ ID NO: 5118 - protein, 43 aa, Artificial Sequence
  Description of Artificial Sequence: Synthetic polypeptide
SGFTFSEYNMWWVRQAPGKGLEWVSVIYPSGGPTWYADSVKGR

SEQ ID NO: 5119 - protein, 43 aa, Artificial Sequence
  Description of Artificial Sequence: Synthetic polypeptide
SGFTFSEYPMFWVRQAPGKGLEWVSYISPSGGWTSYADSVKGR

SEQ ID NO: 5120 - protein, 43 aa, Artificial Sequence
  Description of Artificial Sequence: Synthetic polypeptide
SGFTFSEYPMIWVRQAPGKGLEWVSYISPSGGYTGYADSVKGR

SEQ ID NO: 5121 - protein, 43 aa, Artificial Sequence
  Description of Artificial Sequence: Synthetic polypeptide
SGFTFSEYPMWWVRQAPGKGLEWVSSIYPSGGATFYADSVKGR

SEQ ID NO: 5122 - protein, 43 aa, Artificial Sequence
  Description of Artificial Sequence: Synthetic polypeptide
SGFTFSEYWMWWVRQAPGKGLEWVSSISPSGGGTFYADSVKGR

SEQ ID NO: 5123 - protein, 43 aa, Artificial Sequence
  Description of Artificial Sequence: Synthetic polypeptide
SGFTFSFYDMFWVRQAPGKGLEWVSVISSSGGGTFYADSVKGR

SEQ ID NO: 5124 - protein, 43 aa, Artificial Sequence
  Description of Artificial Sequence: Synthetic polypeptide
SGFTFSFYDMLWVRQAPGKGLEWVSYISSSGGFTGYADSVKGR

SEQ ID NO: 5125 - protein, 43 aa, Artificial Sequence
  Description of Artificial Sequence: Synthetic polypeptide
SGFTFSFYDMWWVRQAPGKGLEWVSSIYSSGGATFYADSVKGR

SEQ ID NO: 5126 - protein, 43 aa, Artificial Sequence
  Description of Artificial Sequence: Synthetic polypeptide
SGFTFSFYDMWWVRQAPGKGLEWVSVIYSSGGATFYADSVKGR

SEQ ID NO: 5127 - protein, 43 aa, Artificial Sequence
  Description of Artificial Sequence: Synthetic polypeptide
SGFTFSFYDMWWVRQAPGKGLEWVSVIYSSGGFTDYADSVKGR

SEQ ID NO: 5128 - protein, 43 aa, Artificial Sequence
  Description of Artificial Sequence: Synthetic polypeptide
SGFTFSFYDMWWVRQAPGKGLEWVSYISSSGGGTFYADSVKGR

SEQ ID NO: 5129 - protein, 43 aa, Artificial Sequence
  Description of Artificial Sequence: Synthetic polypeptide
SGFTFSFYDMYWVRQAPGKGLEWVSSIVPSGGATFYADSVKGR

SEQ ID NO: 5130 - protein, 43 aa, Artificial Sequence
  Description of Artificial Sequence: Synthetic polypeptide
SGFTFSFYEMWWVRQAPGKGLEWVSYISPSGGGTYYADSVKGR

SEQ ID NO: 5131 - protein, 42 aa, Artificial Sequence
  Description of Artificial Sequence: Synthetic polypeptide
SGFTFSFYHMIWVRQAPGKGLEWVSYIYSSGGTFYADSVKGR

SEQ ID NO: 5132 - protein, 43 aa, Artificial Sequence
  Description of Artificial Sequence: Synthetic polypeptide
SGFTFSFYMMWWVRQAPGKGLEWVSSISPSGGATFYADSVKGR

SEQ ID NO: 5133 - protein, 43 aa, Artificial Sequence
  Description of Artificial Sequence: Synthetic polypeptide
SGFTFSFYNMWWVRQAPGKGLEWVSSISPSGGGTFYADSVKGR

SEQ ID NO: 5134 - protein, 43 aa, Artificial Sequence
  Description of Artificial Sequence: Synthetic polypeptide
SGFTFSFYNMWWVRQAPGKGLEWVSVIYPSGGKTYYADSVKGR

SEQ ID NO: 5135 - protein, 43 aa, Artificial Sequence
  Description of Artificial Sequence: Synthetic polypeptide
SGFTFSFYNMWWVRQAPGKGLEWVSVIYPSGGPTFYADSVKGR

SEQ ID NO: 5136 - protein, 43 aa, Artificial Sequence
  Description of Artificial Sequence: Synthetic polypeptide
SGFTFSFYPMIWVRQAPGKGLEWVSYISPSGGSTLYADSVKGR

SEQ ID NO: 5137 - protein, 43 aa, Artificial Sequence
  Description of Artificial Sequence: Synthetic polypeptide
SGFTFSFYPMIWVRQAPGKGLEWVSYISSSGGFTDYADSVKGR

SEQ ID NO: 5138 - protein, 43 aa, Artificial Sequence
  Description of Artificial Sequence: Synthetic polypeptide
SGFTFSFYPMIWVRQAPGKGLEWVSYISSSGGYTSYADSVKGR

SEQ ID NO: 5139 - protein, 41 aa, Artificial Sequence
  Description of Artificial Sequence: Synthetic polypeptide
SGFTFSFYPMLWVRQAPGKGLEWVSYISGGYTGYADSVKGR

SEQ ID NO: 5140 - protein, 43 aa, Artificial Sequence
  Description of Artificial Sequence: Synthetic polypeptide
SGFTFSFYPMMWVRQAPGKGLEWVSYISFSGGYTGYADSVKGR

SEQ ID NO: 5141 - protein, 43 aa, Artificial Sequence
  Description of Artificial Sequence: Synthetic polypeptide
SGFTFSFYPMWWVRQAPGKGLEWVSYIYPSGGATFYADSVKGR

SEQ ID NO: 5142 - protein, 43 aa, Artificial Sequence
  Description of Artificial Sequence: Synthetic polypeptide
SGFTFSGYDMWWVRQAPGKGLEWVSVISPSGGGTFYADSVKGR

SEQ ID NO: 5143 - protein, 43 aa, Artificial Sequence
  Description of Artificial Sequence: Synthetic polypeptide
SGFTFSGYDMWWVRQAPGKGLEWVSVIYSSGGTTFYADSVKGR

SEQ ID NO: 5144 - protein, 43 aa, Artificial Sequence
  Description of Artificial Sequence: Synthetic polypeptide
SGFTFSGYNMWWVRQAPGKGLEWVSVIYPSGGATFYADSVKGR

SEQ ID NO: 5145 - protein, 43 aa, Artificial Sequence
  Description of Artificial Sequence: Synthetic polypeptide
SGFTFSGYPMWWVRQAPGKGLEWVSYISSSGGGTFYADSVKGR

SEQ ID NO: 5146 - protein, 43 aa, Artificial Sequence
  Description of Artificial Sequence: Synthetic polypeptide
SGFTFSHYAMIWVRQAPGKGLEWVSYIVPSGGWTDYADSVKGR

SEQ ID NO: 5147 - protein, 43 aa, Artificial Sequence
  Description of Artificial Sequence: Synthetic polypeptide
SGFTFSHYAMIWVRQAPGKGLEWVSYIVPSGGWTGYADSVKGR

SEQ ID NO: 5148 - protein, 43 aa, Artificial Sequence
  Description of Artificial Sequence: Synthetic polypeptide
SGFTFSHYDMWWVRQAPGKGLEWVSSISPSGGATFYADSVKGR

SEQ ID NO: 5149 - protein, 42 aa, Artificial Sequence
  Description of Artificial Sequence: Synthetic polypeptide
SGFTFSHYDMWWVRQAPGKGLEWVSVIVSSGKTFYADSVKGR

SEQ ID NO: 5150 - protein, 43 aa, Artificial Sequence
  Description of Artificial Sequence: Synthetic polypeptide
SGFTFSHYDMWWVRQAPGKGLEWVSVIYPSGGFTDYADSVKGR

SEQ ID NO: 5151 - protein, 43 aa, Artificial Sequence
  Description of Artificial Sequence: Synthetic polypeptide
SGFTFSHYDMWWVRQAPGKGLEWVSVIYPSGGHTLYADSVKGR

SEQ ID NO: 5152 - protein, 43 aa, Artificial Sequence
  Description of Artificial Sequence: Synthetic polypeptide
SGFTFSHYDMWWVRQAPGKGLEWVSVIYPSGGPTYYADSVKGR

SEQ ID NO: 5153 - protein, 43 aa, Artificial Sequence
  Description of Artificial Sequence: Synthetic polypeptide
SGFTFSHYDMWWVRQAPGKGLEWVSVIYPSGGVTYYADSVKGR

SEQ ID NO: 5154 - protein, 43 aa, Artificial Sequence
  Description of Artificial Sequence: Synthetic polypeptide
SGFTFSHYDMWWVRQAPGKGLEWVSVIYSSGGFTGYADSVKGR

SEQ ID NO: 5155 - protein, 43 aa, Artificial Sequence
  Description of Artificial Sequence: Synthetic polypeptide
SGFTFSHYDMWWVRQAPGKGLEWVSVIYSSGGPTYYADSVKGR

SEQ ID NO: 5156 - protein, 43 aa, Artificial Sequence
  Description of Artificial Sequence: Synthetic polypeptide
SGFTFSHYDMWWVRQAPGKGLEWVSYISPSGGFTSYADSVKGR

SEQ ID NO: 5157 - protein, 43 aa, Artificial Sequence
  Description of Artificial Sequence: Synthetic polypeptide
SGFTFSHYEMWWVRQAPGKGLEWVSSISSSGGGTFYADSVKGR

SEQ ID NO: 5158 - protein, 43 aa, Artificial Sequence
  Description of Artificial Sequence: Synthetic polypeptide
SGFTFSHYEMWWVRQAPGKGLEWVSYIGSSGGSTYYADSVKGR

SEQ ID NO: 5159 - protein, 43 aa, Artificial Sequence
  Description of Artificial Sequence: Synthetic polypeptide
SGFTFSHYMMIWVRQAPGKGLEWVSGISPSGGYTGYADSVKGR

SEQ ID NO: 5160 - protein, 43 aa, Artificial Sequence
  Description of Artificial Sequence: Synthetic polypeptide
SGFTFSHYMMWWVRQAPGKGLEWVSSIYPSGGGTYYADSVKGR

SEQ ID NO: 5161 - protein, 42 aa, Artificial Sequence
  Description of Artificial Sequence: Synthetic polypeptide
SGFTFSHYMMWWVRQAPGKGLEWVSSIYPSGGTYYADSVKGR

SEQ ID NO: 5162 - protein, 43 aa, Artificial Sequence
  Description of Artificial Sequence: Synthetic polypeptide
SGFTFSHYPMFWVRQAPGKGLEWVSYISSSGGWTDYADSVKGR

SEQ ID NO: 5163 - protein, 43 aa, Artificial Sequence
  Description of Artificial Sequence: Synthetic polypeptide
SGFTFSHYPMIWVRQAPGKGLEWVSYISPSGGGTFYADSVKGR

SEQ ID NO: 5164 - protein, 43 aa, Artificial Sequence
  Description of Artificial Sequence: Synthetic polypeptide
SGFTFSHYPMIWVRQAPGKGLEWVSYISSSGGGTFYADSVKGR

SEQ ID NO: 5165 - protein, 43 aa, Artificial Sequence
  Description of Artificial Sequence: Synthetic polypeptide
SGFTFSHYPMIWVRQAPGKGLEWVSYIYSSGGGTFYADSVKGR

SEQ ID NO: 5166 - protein, 43 aa, Artificial Sequence
  Description of Artificial Sequence: Synthetic polypeptide
SGFTFSHYPMLWVRQAPGKGLEWVSYIYPSGGGTFYADSVKGR

SEQ ID NO: 5167 - protein, 43 aa, Artificial Sequence
  Description of Artificial Sequence: Synthetic polypeptide
SGFTFSHYPMMWVRQAPGKGLEWVSYISSSGGYTGYADSVKGR

SEQ ID NO: 5168 - protein, 43 aa, Artificial Sequence
  Description of Artificial Sequence: Synthetic polypeptide
SGFTFSHYPMMWVRQAPGKGLEWVSYIYSSGGGTYYADSVKGR

SEQ ID NO: 5169 - protein, 43 aa, Artificial Sequence
  Description of Artificial Sequence: Synthetic polypeptide
SGFTFSHYPMVWVRQAPGKGLEWVSYISPSGGYTGYADSVKGR

SEQ ID NO: 5170 - protein, 43 aa, Artificial Sequence
  Description of Artificial Sequence: Synthetic polypeptide
SGFTFSHYPMWWVRQAPGKGLEWVSSISPSGGATFYADSVKGR

SEQ ID NO: 5171 - protein, 43 aa, Artificial Sequence
  Description of Artificial Sequence: Synthetic polypeptide
SGFTFSHYPMWWVRQAPGKGLEWVSVIYSSGGGTFYADSVKGR

SEQ ID NO: 5172 - protein, 43 aa, Artificial Sequence
  Description of Artificial Sequence: Synthetic polypeptide
SGFTFSHYPMWWVRQAPGKGLEWVSWIVPSGGFTLYADSVKGR

SEQ ID NO: 5173 - protein, 43 aa, Artificial Sequence
  Description of Artificial Sequence: Synthetic polypeptide
SGFTFSHYPMWWVRQAPGKGLEWVSYIHPSGGGTLYADSVKGR

SEQ ID NO: 5174 - protein, 43 aa, Artificial Sequence
  Description of Artificial Sequence: Synthetic polypeptide
SGFTFSHYPMWWVRQAPGKGLEWVSYISSSGGGTFYADSVKGR

SEQ ID NO: 5175 - protein, 43 aa, Artificial Sequence
  Description of Artificial Sequence: Synthetic polypeptide
SGFTFSHYPMWWVRQAPGKGLEWVSYIVPSGGATFYADSVKGR

SEQ ID NO: 5176 - protein, 43 aa, Artificial Sequence
  Description of Artificial Sequence: Synthetic polypeptide
SGFTFSHYPMWWVRQAPGKGLEWVSYIYPSGGGTYYADSVKGR

SEQ ID NO: 5177 - protein, 43 aa, Artificial Sequence
  Description of Artificial Sequence: Synthetic polypeptide
SGFTFSHYQMWWVRQAPGKGLEWVSSISSSGGGTYYADSVKGR

SEQ ID NO: 5178 - protein, 43 aa, Artificial Sequence
  Description of Artificial Sequence: Synthetic polypeptide
SGFTFSHYSMMWVRQDPGKGLEWVSYISPSGGYTGYADSVKGR

SEQ ID NO: 5179 - protein, 43 aa, Artificial Sequence
  Description of Artificial Sequence: Synthetic polypeptide
SGFTFSHYSMWWVRQAPGKGLEWVSVIYPSGGATFYADSVKGR

SEQ ID NO: 5180 - protein, 43 aa, Artificial Sequence
  Description of Artificial Sequence: Synthetic polypeptide
SGFTFSIYDMWWVRQAPGKGLEWVSVISPSGGSTYYADSVKGR

SEQ ID NO: 5181 - protein, 43 aa, Artificial Sequence
  Description of Artificial Sequence: Synthetic polypeptide
SGFTFSIYDMWWVRQAPGKGLEWVSVIYPSGGATWYADSVKGR

SEQ ID NO: 5182 - protein, 43 aa, Artificial Sequence
  Description of Artificial Sequence: Synthetic polypeptide
SGFTFSIYDMWWVRQAPGKGLEWVSVIYPSGGPTFYADSVKGR

SEQ ID NO: 5183 - protein, 43 aa, Artificial Sequence
  Description of Artificial Sequence: Synthetic polypeptide
SGFTFSIYDMWWVRQAPGKGLEWVSVIYPSGGVTFYADSVKGR

SEQ ID NO: 5184 - protein, 43 aa, Artificial Sequence
  Description of Artificial Sequence: Synthetic polypeptide
SGFTFSIYDMWWVRQAPGKGLEWVSVIYSSGGFTGYADSVKGR

SEQ ID NO: 5185 - protein, 43 aa, Artificial Sequence
  Description of Artificial Sequence: Synthetic polypeptide
SGFTFSIYPMIWVRQAPGKGLEWVSYISPSGGYTSYADSVKGR

SEQ ID NO: 5186 - protein, 43 aa, Artificial Sequence
  Description of Artificial Sequence: Synthetic polypeptide
SGFTFSIYPMWWVRQAPGKGLEWVSYISPSGGFTSYADSVKGR

SEQ ID NO: 5187 - protein, 43 aa, Artificial Sequence
  Description of Artificial Sequence: Synthetic polypeptide
SGFTFSIYPMWWVRQAPGKGLEWVSYISPSGGGTYYADSVKGR

SEQ ID NO: 5188 - protein, 43 aa, Artificial Sequence
  Description of Artificial Sequence: Synthetic polypeptide
SGFTFSIYPMWWVRQAPGKGLEWVSYISSSGGWTDYADSVKGR

SEQ ID NO: 5189 - protein, 43 aa, Artificial Sequence
  Description of Artificial Sequence: Synthetic polypeptide
SGFTFSIYPMWWVRQAPGKGLEWVSYIVPSGGMTYYADSVKGR

SEQ ID NO: 5190 - protein, 43 aa, Artificial Sequence
  Description of Artificial Sequence: Synthetic polypeptide
SGFTFSIYPMWWVRQAPGKGLEWVSYIYPSGGGTFYADSVKGR

SEQ ID NO: 5191 - protein, 43 aa, Artificial Sequence
  Description of Artificial Sequence: Synthetic polypeptide
SGFTFSKYAMIWVRQAPGKGLEWVSWIPPSGGYTSYADSVKGR

SEQ ID NO: 5192 - protein, 43 aa, Artificial Sequence
  Description of Artificial Sequence: Synthetic polypeptide
SGFTFSKYAMIWVRQAPGKGLEWVSYISPSGGFTGYADSVKGR

SEQ ID NO: 5193 - protein, 43 aa, Artificial Sequence
  Description of Artificial Sequence: Synthetic polypeptide
SGFTFSKYAMIWVRQSPGKGLEWVSYISSSGGFTDYADSVKGR

SEQ ID NO: 5194 - protein, 43 aa, Artificial Sequence
  Description of Artificial Sequence: Synthetic polypeptide
SGFTFSKYAMWWVRQAPGKGLEWVSSISPSGGGTFYADSVKGR

SEQ ID NO: 5195 - protein, 43 aa, Artificial Sequence
  Description of Artificial Sequence: Synthetic polypeptide
SGFTFSKYAMWWVRQAPGKGLEWVSYIVPSGGRTFYADSVKGR

SEQ ID NO: 5196 - protein, 43 aa, Artificial Sequence
  Description of Artificial Sequence: Synthetic polypeptide
SGFTFSKYDMFWVRQAPGKGLEWVSSIVPSGGATYYADSVKGR

SEQ ID NO: 5197 - protein, 43 aa, Artificial Sequence
  Description of Artificial Sequence: Synthetic polypeptide
SGFTFSKYDMIWVRQAPGKGLEWVSWIGPSGGATMYADSVKGR

SEQ ID NO: 5198 - protein, 43 aa, Artificial Sequence
  Description of Artificial Sequence: Synthetic polypeptide
SGFTFSKYDMIWVRQAPGKGLEWVSYIGSSGGYTGYADSVKGR

SEQ ID NO: 5199 - protein, 43 aa, Artificial Sequence
  Description of Artificial Sequence: Synthetic polypeptide
SGFTFSKYDMWWVRQAPGKGLEWVSSISSSGGGTFYADSVKGR

SEQ ID NO: 5200 - protein, 43 aa, Artificial Sequence
  Description of Artificial Sequence: Synthetic polypeptide
SGFTFSKYDMWWVRQAPGKGLEWVSVIYPSGGPTFYADSVKGR

SEQ ID NO: 5201 - protein, 43 aa, Artificial Sequence
  Description of Artificial Sequence: Synthetic polypeptide
SGFTFSKYDMWWVRQAPGKGLEWVSVIYPSGGQTYYADSVKGR

SEQ ID NO: 5202 - protein, 43 aa, Artificial Sequence
  Description of Artificial Sequence: Synthetic polypeptide
SGFTFSKYDMWWVRQAPGKGLEWVSVIYPSGGSTYYADSVKGR

SEQ ID NO: 5203 - protein, 43 aa, Artificial Sequence
  Description of Artificial Sequence: Synthetic polypeptide
SGFTFSKYDMWWVRQAPGKGLEWVSVIYSSGGFTLYADSVKGR

SEQ ID NO: 5204 - protein, 43 aa, Artificial Sequence
  Description of Artificial Sequence: Synthetic polypeptide
SGFTFSKYDMWWVRQAPGKGLEWVSVIYSSGGFTSYADSVKGR

SEQ ID NO: 5205 - protein, 43 aa, Artificial Sequence
  Description of Artificial Sequence: Synthetic polypeptide
SGFTFSKYDMWWVRQAPGKGLEWVSVIYSSGGPTFYADSVKGR

SEQ ID NO: 5206 - protein, 43 aa, Artificial Sequence
  Description of Artificial Sequence: Synthetic polypeptide
SGFTFSKYDMWWVRQAPGKGLEWVSYIGPSGGFTDYADSVKGR

SEQ ID NO: 5207 - protein, 43 aa, Artificial Sequence
  Description of Artificial Sequence: Synthetic polypeptide
SGFTFSKYDMWWVRQAPGKGLEWVSYISSSGGFTDYADSVKGR

SEQ ID NO: 5208 - protein, 43 aa, Artificial Sequence
  Description of Artificial Sequence: Synthetic polypeptide
SGFTFSKYDMWWVRQAPGKGLEWVSYIVPSGGFIDYADSVKGR

SEQ ID NO: 5209 - protein, 43 aa, Artificial Sequence
  Description of Artificial Sequence: Synthetic polypeptide
SGFTFSKYEMFWVRQAPGKGLEWVSSISSSGGGTFYADSVKGR

SEQ ID NO: 5210 - protein, 43 aa, Artificial Sequence
  Description of Artificial Sequence: Synthetic polypeptide
SGFTFSKYEMWWVRQAPGKGLEWVSVIYPSGGMTYYADSVKGR

SEQ ID NO: 5211 - protein, 43 aa, Artificial Sequence
  Description of Artificial Sequence: Synthetic polypeptide
SGFTFSKYEMWWVRQAPGKGLEWVSVIYPSGGYTGYADSVKGR

SEQ ID NO: 5212 - protein, 43 aa, Artificial Sequence
  Description of Artificial Sequence: Synthetic polypeptide
SGFTFSKYEMWWVRQAPGKGLEWVSVIYSSGGKTYYADSVKGR

SEQ ID NO: 5213 - protein, 43 aa, Artificial Sequence
  Description of Artificial Sequence: Synthetic polypeptide
SGFTFSKYEMWWVRQAPGKGLEWVSYIGPSGGFTDYADSVKGR

SEQ ID NO: 5214 - protein, 43 aa, Artificial Sequence
  Description of Artificial Sequence: Synthetic polypeptide
SGFTFSKYEMWWVRQAPGKGLEWVSYIGPSGGITMYADSVKGR

SEQ ID NO: 5215 - protein, 43 aa, Artificial Sequence
  Description of Artificial Sequence: Synthetic polypeptide
SGFTFSKYEMWWVRQAPGKGLEWVSYISPSGGGTLYADSVKGR

SEQ ID NO: 5216 - protein, 43 aa, Artificial Sequence
  Description of Artificial Sequence: Synthetic polypeptide
SGFTFSKYMMFWVRQAPGKGLEWVSSIYSSGGRTFYADSVKGR

SEQ ID NO: 5217 - protein, 43 aa, Artificial Sequence
  Description of Artificial Sequence: Synthetic polypeptide
SGFTFSKYNMWWVRQAPGKGLEWVSSIYPSGGATFYADSVKGR

SEQ ID NO: 5218 - protein, 43 aa, Artificial Sequence
  Description of Artificial Sequence: Synthetic polypeptide
SGFTFSKYNMWWVRQAPGKGLEWVSVIYPSGGATFYADSVKGR

SEQ ID NO: 5219 - protein, 43 aa, Artificial Sequence
  Description of Artificial Sequence: Synthetic polypeptide
SGFTFSKYPMFWVRQAPGKGLEWVSYIVPSGGYTSYADSVKGR

SEQ ID NO: 5220 - protein, 43 aa, Artificial Sequence
  Description of Artificial Sequence: Synthetic polypeptide
SGFTFSKYPMIWVRQAPGKGLEWVSYISPSGGYTGYADSVKGR

SEQ ID NO: 5221 - protein, 43 aa, Artificial Sequence
  Description of Artificial Sequence: Synthetic polypeptide
SGFTFSKYPMIWVRQAPGKGLEWVSYISPSGGYTSYADSVKGR

SEQ ID NO: 5222 - protein, 43 aa, Artificial Sequence
  Description of Artificial Sequence: Synthetic polypeptide
SGFTFSKYPMIWVRQAPGKGLEWVSYISSSGGWTDYADSVKGR

SEQ ID NO: 5223 - protein, 43 aa, Artificial Sequence
  Description of Artificial Sequence: Synthetic polypeptide
SGFTFSKYPMIWVRQAPGKGLEWVSYIYPSGGATYYADSVKGR

SEQ ID NO: 5224 - protein, 43 aa, Artificial Sequence
  Description of Artificial Sequence: Synthetic polypeptide
SGFTFSKYPMIWVRQAPGKGLEWVSYIYPSGGYTSYADSVKGR

SEQ ID NO: 5225 - protein, 43 aa, Artificial Sequence
  Description of Artificial Sequence: Synthetic polypeptide
SGFTFSKYPMIWVRQAPGKGLEWVSYIYSSGGGTYYADSVKGR

SEQ ID NO: 5226 - protein, 43 aa, Artificial Sequence
  Description of Artificial Sequence: Synthetic polypeptide
SGFTFSKYPMMWVRQAPGKGLEWVSYISPSGGFTDYADSVKGR

SEQ ID NO: 5227 - protein, 43 aa, Artificial Sequence
  Description of Artificial Sequence: Synthetic polypeptide
SGFTFSKYPMMWVRQAPGKGLEWVSYIYPSGGYTDYADSVKGR

SEQ ID NO: 5228 - protein, 43 aa, Artificial Sequence
  Description of Artificial Sequence: Synthetic polypeptide
SGFTFSKYPMMWVRQAPGKGLEWVSYIYPSGGYTGYADSVKGR

SEQ ID NO: 5229 - protein, 43 aa, Artificial Sequence
  Description of Artificial Sequence: Synthetic polypeptide
SGFTFSKYPMWWVRQAPGKGLEWVSSIVSSGGATYYTDSVKGR

SEQ ID NO: 5230 - protein, 43 aa, Artificial Sequence
  Description of Artificial Sequence: Synthetic polypeptide
SGFTFSKYPMWWVRQAPGKGLEWVSSIYPSGGYTGYADSVKGR

SEQ ID NO: 5231 - protein, 43 aa, Artificial Sequence
  Description of Artificial Sequence: Synthetic polypeptide
SGFTFSKYPMWWVRQAPGKGLEWVSVISPSGGATYYADSVKGR

SEQ ID NO: 5232 - protein, 43 aa, Artificial Sequence
  Description of Artificial Sequence: Synthetic polypeptide
SGFTFSKYPMWWVRQAPGKGLEWVSVIYPSGGYTAYADSVKGR

SEQ ID NO: 5233 - protein, 43 aa, Artificial Sequence
  Description of Artificial Sequence: Synthetic polypeptide
SGFTFSKYPMWWVRQAPGKGLEWVSVIYSSGGGTFYADSVKGR

SEQ ID NO: 5234 - protein, 43 aa, Artificial Sequence
  Description of Artificial Sequence: Synthetic polypeptide
SGFTFSKYPMWWVRQAPGKGLEWVSYISPSGGGTLYADSVKGR

SEQ ID NO: 5235 - protein, 43 aa, Artificial Sequence
  Description of Artificial Sequence: Synthetic polypeptide
SGFTFSKYPMWWVRQAPGKGLEWVSYISPSGGGTYYADSVKGR

SEQ ID NO: 5236 - protein, 43 aa, Artificial Sequence
  Description of Artificial Sequence: Synthetic polypeptide
SGFTFSKYPMWWVRQAPGKGLEWVSYISSSGGGTYYADSVKGR

SEQ ID NO: 5237 - protein, 43 aa, Artificial Sequence
  Description of Artificial Sequence: Synthetic polypeptide
SGFTFSKYPMWWVRQAPGKGLEWVSYIVPSGGATFYADSVKGR

SEQ ID NO: 5238 - protein, 43 aa, Artificial Sequence
  Description of Artificial Sequence: Synthetic polypeptide
SGFTFSKYPMWWVRQAPGKGLEWVSYIVPSGGPTWYADSVKGR

SEQ ID NO: 5239 - protein, 43 aa, Artificial Sequence
  Description of Artificial Sequence: Synthetic polypeptide
SGFTFSKYPMWWVRQAPGKGLEWVSYIVPSGGWTAYADSVKGR

SEQ ID NO: 5240 - protein, 43 aa, Artificial Sequence
  Description of Artificial Sequence: Synthetic polypeptide
SGFTFSKYQMWWVRQAPGKGLEWVSSIYPSGGATFYADSVKGR

SEQ ID NO: 5241 - protein, 43 aa, Artificial Sequence
  Description of Artificial Sequence: Synthetic polypeptide
SGFTFSKYQMWWVRQAPGKGLEWVSSIYPSGGGTFYADSVKGR

SEQ ID NO: 5242 - protein, 43 aa, Artificial Sequence
  Description of Artificial Sequence: Synthetic polypeptide
SGFTFSKYSMIWVRQAPGKGLEWVSYIVPSGGYTGYADSVKGR

SEQ ID NO: 5243 - protein, 43 aa, Artificial Sequence
  Description of Artificial Sequence: Synthetic polypeptide
SGFTFSKYSMWWVRQAPGKGLEWVSSIYPSGGATFYADSVKGR

SEQ ID NO: 5244 - protein, 43 aa, Artificial Sequence
  Description of Artificial Sequence: Synthetic polypeptide
SGFTFSKYSMWWVRQAPGKGLEWVSVIYPSGGATFYADSVKGR

SEQ ID NO: 5245 - protein, 43 aa, Artificial Sequence
  Description of Artificial Sequence: Synthetic polypeptide
SGFTFSKYSMWWVRQAPGKGLEWVSVIYPSGGFTDYADSVKGR

SEQ ID NO: 5246 - protein, 43 aa, Artificial Sequence
  Description of Artificial Sequence: Synthetic polypeptide
SGFTFSKYTMWWVRQAPGKGLEWVSVIYPSGGATFYADSVKGR

SEQ ID NO: 5247 - protein, 43 aa, Artificial Sequence
  Description of Artificial Sequence: Synthetic polypeptide
SGFTFSKYWMWWVRQAPGKGLEWVSVIVPSGGMTYYADSVKGR

SEQ ID NO: 5248 - protein, 43 aa, Artificial Sequence
  Description of Artificial Sequence: Synthetic polypeptide
SGFTFSKYYMWWVRQAPGKGLEWVSSIYSSGGGTFYADSVKGR

SEQ ID NO: 5249 - protein, 43 aa, Artificial Sequence
  Description of Artificial Sequence: Synthetic polypeptide
SGFTFSLYAMIWVRQAPGKGLEWVSYISPSGGFTGYADSVKGR

SEQ ID NO: 5250 - protein, 43 aa, Artificial Sequence
  Description of Artificial Sequence: Synthetic polypeptide
SGFTFSLYAMWWVRQAPGKGLEWVSSIVPSGGKTYYADSVKGR

SEQ ID NO: 5251 - protein, 43 aa, Artificial Sequence
  Description of Artificial Sequence: Synthetic polypeptide
SGFTFSLYAMWWVRQAPGKGLEWVSYIYPSGGGTYYADSVKGR

SEQ ID NO: 5252 - protein, 43 aa, Artificial Sequence
  Description of Artificial Sequence: Synthetic polypeptide
SGFTFSLYDMLWVRQAPGKGLEWVSYIYPSGGFTGYADSVKGR

SEQ ID NO: 5253 - protein, 43 aa, Artificial Sequence
  Description of Artificial Sequence: Synthetic polypeptide
SGFTFSLYDMVWVRQAPGKGLEWVSWIGPSGGLTIYADSVKGR

SEQ ID NO: 5254 - protein, 43 aa, Artificial Sequence
  Description of Artificial Sequence: Synthetic polypeptide
SGFTFSLYDMWWVRQAPGKGLEWVSSISSSGGYTGYADSVKGR

SEQ ID NO: 5255 - protein, 43 aa, Artificial Sequence
  Description of Artificial Sequence: Synthetic polypeptide
SGFTFSLYDMWWVRQAPGKGLEWVSVIRPSGGSTYYADSVKGR

SEQ ID NO: 5256 - protein, 43 aa, Artificial Sequence
  Description of Artificial Sequence: Synthetic polypeptide
SGFTFSLYDMWWVRQAPGKGLEWVSVIYPSGGPTYYADSVKGR

SEQ ID NO: 5257 - protein, 43 aa, Artificial Sequence
  Description of Artificial Sequence: Synthetic polypeptide
SGFTFSLYDMWWVRQAPGKGLEWVSVIYSSGGATFYADSVKGR

SEQ ID NO: 5258 - protein, 43 aa, Artificial Sequence
  Description of Artificial Sequence: Synthetic polypeptide
SGFTFSLYDMWWVRQAPGKGLEWVSVIYSSGGTTFYADSVKGR

SEQ ID NO: 5259 - protein, 43 aa, Artificial Sequence
  Description of Artificial Sequence: Synthetic polypeptide
SGFTFSLYDMWWVRQAPGKGLEWVSVIYSSGGYTAYADSVKGR

SEQ ID NO: 5260 - protein, 43 aa, Artificial Sequence
  Description of Artificial Sequence: Synthetic polypeptide
SGFTFSLYDMWWVRQAPGKGLEWVSVIYSSGGYTGYADSVKGR

SEQ ID NO: 5261 - protein, 43 aa, Artificial Sequence
  Description of Artificial Sequence: Synthetic polypeptide
SGFTFSLYDMWWVRQAPGKGLEWVSYIGPSGGNTLYADSVKGR

SEQ ID NO: 5262 - protein, 43 aa, Artificial Sequence
  Description of Artificial Sequence: Synthetic polypeptide
SGFTFSLYEMWWVRQAPGKGLEWVSVISPSGGGTYYADSVKGR

SEQ ID NO: 5263 - protein, 43 aa, Artificial Sequence
  Description of Artificial Sequence: Synthetic polypeptide
SGFTFSLYEMWWVRQAPGKGLEWVSYISSSGGGTLYADSVKGR

SEQ ID NO: 5264 - protein, 42 aa, Artificial Sequence
  Description of Artificial Sequence: Synthetic polypeptide
SGFTFSLYMMWWVRKAPGKGLEWVSSIYPSGGTYYADSVKGR

SEQ ID NO: 5265 - protein, 43 aa, Artificial Sequence
  Description of Artificial Sequence: Synthetic polypeptide
SGFTFSLYNMWWVRQAPGKGLEWVSVIYPSGGYTGYADSVKGR

SEQ ID NO: 5266 - protein, 43 aa, Artificial Sequence
  Description of Artificial Sequence: Synthetic polypeptide
SGFTFSLYPMIWVRQAPGKGLEWVSYISPSGGFTDYADSVKGR

SEQ ID NO: 5267 - protein, 43 aa, Artificial Sequence
  Description of Artificial Sequence: Synthetic polypeptide
SGFTFSLYPMMWVRQAPGKGLEWVSYIYPSGGGTFYADSVKGR

SEQ ID NO: 5268 - protein, 43 aa, Artificial Sequence
  Description of Artificial Sequence: Synthetic polypeptide
SGFTFSLYPMWWVRQAPGKGLEWVSSISPSGGATFYADSVKGR

SEQ ID NO: 5269 - protein, 43 aa, Artificial Sequence
  Description of Artificial Sequence: Synthetic polypeptide
SGFTFSLYPMWWVRQAPGKGLEWVSSISPSGGGTFYADSVKGR

SEQ ID NO: 5270 - protein, 43 aa, Artificial Sequence
  Description of Artificial Sequence: Synthetic polypeptide
SGFTFSLYPMWWVRQAPGKGLEWVSSIYPSGGATFYADSVKGR

SEQ ID NO: 5271 - protein, 43 aa, Artificial Sequence
  Description of Artificial Sequence: Synthetic polypeptide
SGFTFSLYPMWWVRQAPGKGLEWVSVIYSSGGATFYADSVKGR

SEQ ID NO: 5272 - protein, 43 aa, Artificial Sequence
  Description of Artificial Sequence: Synthetic polypeptide
SGFTFSLYPMWWVRQAPGKGLEWVSWIVPSGGFTLYADSVKGR

SEQ ID NO: 5273 - protein, 43 aa, Artificial Sequence
  Description of Artificial Sequence: Synthetic polypeptide
SGFTFSLYPMWWVRQAPGKGLEWVSYISPSGGGTLYADSVKGR

SEQ ID NO: 5274 - protein, 43 aa, Artificial Sequence
  Description of Artificial Sequence: Synthetic polypeptide
SGFTFSLYPMWWVRQAPGKGLEWVSYISSSGGGTYYADSVKGR

SEQ ID NO: 5275 - protein, 43 aa, Artificial Sequence
  Description of Artificial Sequence: Synthetic polypeptide
SGFTFSLYPMWWVRQAPGKGLEWVSYIVPSGGGTFYADSVKGR

SEQ ID NO: 5276 - protein, 43 aa, Artificial Sequence
  Description of Artificial Sequence: Synthetic polypeptide
SGFTFSLYPMWWVRQAPGKGLEWVSYIVSSGGATFYADSVKGR

SEQ ID NO: 5277 - protein, 43 aa, Artificial Sequence
  Description of Artificial Sequence: Synthetic polypeptide
SGFTFSLYPMWWVRQAPGKGLEWVSYIYPSGGATMYADSVKGR

SEQ ID NO: 5278 - protein, 43 aa, Artificial Sequence
  Description of Artificial Sequence: Synthetic polypeptide
SGFTFSLYQMWWVRQAPGKGLEWVSVIYPSGGATYYADSVKGR

SEQ ID NO: 5279 - protein, 42 aa, Artificial Sequence
  Description of Artificial Sequence: Synthetic polypeptide
SGFTFSLYQMWWVRQAPGKGLEWVSVIYPSGGTFYADSVKGR

SEQ ID NO: 5280 - protein, 43 aa, Artificial Sequence
  Description of Artificial Sequence: Synthetic polypeptide
SGFTFSMYDMWWVRQAPGKGLEWVSVISPSGGGTFYADSVKGR

SEQ ID NO: 5281 - protein, 43 aa, Artificial Sequence
  Description of Artificial Sequence: Synthetic polypeptide
SGFTFSMYDMWWVRQAPGKGLEWVSVIYPSGGNTLYADSVKGR

SEQ ID NO: 5282 - protein, 43 aa, Artificial Sequence
  Description of Artificial Sequence: Synthetic polypeptide
SGFTFSMYDMWWVRQAPGKGLEWVSVIYPSGGPTFYADSVKGR

SEQ ID NO: 5283 - protein, 43 aa, Artificial Sequence
  Description of Artificial Sequence: Synthetic polypeptide
SGFTFSMYDMWWVRQAPGKGLEWVSVIYPSGGYTAYADSVKGR

SEQ ID NO: 5284 - protein, 43 aa, Artificial Sequence
  Description of Artificial Sequence: Synthetic polypeptide
SGFTFSMYDMWWVRQAPGKGLEWVSVIYSSGGFTDYADSVKGR

SEQ ID NO: 5285 - protein, 43 aa, Artificial Sequence
  Description of Artificial Sequence: Synthetic polypeptide
SGFTFSMYDMWWVRQAPGKGLEWVSVIYSSGGPTFYADSVKGR

SEQ ID NO: 5286 - protein, 43 aa, Artificial Sequence
  Description of Artificial Sequence: Synthetic polypeptide
SGFTFSMYDMWWVRQAPGKGLEWVSVIYSSGGVTFYADSVKGR

SEQ ID NO: 5287 - protein, 43 aa, Artificial Sequence
  Description of Artificial Sequence: Synthetic polypeptide
SGFTFSMYDMWWVRQAPGKGLEWVSVIYSSGGYTAYADSVKGR

SEQ ID NO: 5288 - protein, 43 aa, Artificial Sequence
  Description of Artificial Sequence: Synthetic polypeptide
SGFTFSMYDMWWVRQAPGKGLEWVSVIYSSGGYTDYADSVKGR

SEQ ID NO: 5289 - protein, 43 aa, Artificial Sequence
  Description of Artificial Sequence: Synthetic polypeptide
SGFTFSMYDMWWVRQAPGKGLEWVSVIYSSGGYTNYADSVKGR

SEQ ID NO: 5290 - protein, 43 aa, Artificial Sequence
  Description of Artificial Sequence: Synthetic polypeptide
SGFTFSMYDMWWVRQAPGKGLEWVSVIYSSGGYTSYADSVKGR

SEQ ID NO: 5291 - protein, 43 aa, Artificial Sequence
  Description of Artificial Sequence: Synthetic polypeptide
SGFTFSMYDMWWVRQAPGKGLEWVSYISSSGGSTLYADSVKGR

SEQ ID NO: 5292 - protein, 43 aa, Artificial Sequence
  Description of Artificial Sequence: Synthetic polypeptide
SGFTFSMYMMIWVRQAPGKGLEWVSSIYPSGGFTSYADSVKGR

SEQ ID NO: 5293 - protein, 43 aa, Artificial Sequence
  Description of Artificial Sequence: Synthetic polypeptide
SGFTFSMYNMWWVRQAPGKGLEWVSSISPSGGATYYADSVKGR

SEQ ID NO: 5294 - protein, 43 aa, Artificial Sequence
  Description of Artificial Sequence: Synthetic polypeptide
SGFTFSMYPIIWVRQAPGKGLEWVSYISPSGGFTGYADSVKGR

SEQ ID NO: 5295 - protein, 43 aa, Artificial Sequence
  Description of Artificial Sequence: Synthetic polypeptide
SGFTFSMYPMFWVRQAPGKGLEWVSYISPSGGWTAYADSVKGR

SEQ ID NO: 5296 - protein, 43 aa, Artificial Sequence
  Description of Artificial Sequence: Synthetic polypeptide
SGFTFSMYPMFWVRQAPGKGLEWVSYISPSGGWTDYADSVKGR

SEQ ID NO: 5297 - protein, 43 aa, Artificial Sequence
  Description of Artificial Sequence: Synthetic polypeptide
SGFTFSMYPMFWVRQAPGKGLEWVSYIVPSGGWTDYADSVKGR

SEQ ID NO: 5298 - protein, 43 aa, Artificial Sequence
  Description of Artificial Sequence: Synthetic polypeptide
SGFTFSMYPMIWVRQAPGKGLEWVSYISPSGGGTFYADSVKGR

SEQ ID NO: 5299 - protein, 43 aa, Artificial Sequence
  Description of Artificial Sequence: Synthetic polypeptide
SGFTFSMYPMIWVRQAPGKGLEWVSYIVPSGGFTGYADSVKGR

SEQ ID NO: 5300 - protein, 43 aa, Artificial Sequence
  Description of Artificial Sequence: Synthetic polypeptide
SGFTFSMYPMLWVRQAPGKGLEWVSYISPSGGYTGYADSVKGR

SEQ ID NO: 5301 - protein, 43 aa, Artificial Sequence
  Description of Artificial Sequence: Synthetic polypeptide
SGFTFSMYPMTWVRQAPGKGLEWVSYISPSGGYTGYADSVKGR

SEQ ID NO: 5302 - protein, 43 aa, Artificial Sequence
  Description of Artificial Sequence: Synthetic polypeptide
SGFTFSMYSMWWVRQAPGKGLEWVSVIYPSGGFTDYADSVKGR

SEQ ID NO: 5303 - protein, 43 aa, Artificial Sequence
  Description of Artificial Sequence: Synthetic polypeptide
SGFTFSMYWMLWVRQAPGKGLEWVSYISPSGGGTFYADSVKGR

SEQ ID NO: 5304 - protein, 43 aa, Artificial Sequence
  Description of Artificial Sequence: Synthetic polypeptide
SGFTFSMYWMWWVRQAPGKGLEWVSSISSSGGYTGYADSVKGR

SEQ ID NO: 5305 - protein, 42 aa, Artificial Sequence
  Description of Artificial Sequence: Synthetic polypeptide
SGFTFSNYAMWWVRQAPGKGLEWVSYISPSGATYYADSVKGR

SEQ ID NO: 5306 - protein, 43 aa, Artificial Sequence
  Description of Artificial Sequence: Synthetic polypeptide
SGFTFSNYAMWWVRQAPGKGLEWVSYISPSGGSTYYADSVKGR

SEQ ID NO: 5307 - protein, 43 aa, Artificial Sequence
  Description of Artificial Sequence: Synthetic polypeptide
SGFTFSNYDMAWVRQAPGKGLEWVSWISSSGGFTDYADSVKGR

SEQ ID NO: 5308 - protein, 43 aa, Artificial Sequence
  Description of Artificial Sequence: Synthetic polypeptide
SGFTFSNYDMIWVRQAPGKGLEWVSVISPSGGWTSYADSVKGR

SEQ ID NO: 5309 - protein, 43 aa, Artificial Sequence
  Description of Artificial Sequence: Synthetic polypeptide
SGFTFSNYDMIWVRQAPGKGLEWVSYIVPSGGYTAYADSVKGR

SEQ ID NO: 5310 - protein, 43 aa, Artificial Sequence
  Description of Artificial Sequence: Synthetic polypeptide
SGFTFSNYDMWWVRQAPGKGLEWVSVISPSGGFTGYADSVKGR

SEQ ID NO: 5311 - protein, 43 aa, Artificial Sequence
  Description of Artificial Sequence: Synthetic polypeptide
SGFTFSNYDMWWVRQAPGKGLEWVSVISSSGGYTGYADSVKGR

SEQ ID NO: 5312 - protein, 42 aa, Artificial Sequence
  Description of Artificial Sequence: Synthetic polypeptide
SGFTFSNYDMWWVRQAPGKGLEWVSVISSSGMTYYADSVKGR

SEQ ID NO: 5313 - protein, 43 aa, Artificial Sequence
  Description of Artificial Sequence: Synthetic polypeptide
SGFTFSNYDMWWVRQAPGKGLEWVSVIVPSGGATYYADSVKGR

SEQ ID NO: 5314 - protein, 43 aa, Artificial Sequence
  Description of Artificial Sequence: Synthetic polypeptide
SGFTFSNYDMWWVRQAPGKGLEWVSVIYPSGGATFYADSVKGR

SEQ ID NO: 5315 - protein, 43 aa, Artificial Sequence
  Description of Artificial Sequence: Synthetic polypeptide
SGFTFSNYDMWWVRQAPGKGLEWVSVIYPSGGITYYADSVKGR

SEQ ID NO: 5316 - protein, 43 aa, Artificial Sequence
  Description of Artificial Sequence: Synthetic polypeptide
SGFTFSNYDMWWVRQAPGKGLEWVSVIYPSGGPTYYADSVKGR

SEQ ID NO: 5317 - protein, 43 aa, Artificial Sequence
  Description of Artificial Sequence: Synthetic polypeptide
SGFTFSNYDMWWVRQAPGKGLEWVSVIYPSGGYTVYADSVKGR

SEQ ID NO: 5318 - protein, 43 aa, Artificial Sequence
  Description of Artificial Sequence: Synthetic polypeptide
SGFTFSNYDMWWVRQAPGKGLEWVSVIYSSGGPTYYADSVKGR

SEQ ID NO: 5319 - protein, 43 aa, Artificial Sequence
  Description of Artificial Sequence: Synthetic polypeptide
SGFTFSNYDMWWVRQAPGKGLEWVSVIYSSGGYTAYADSVKGR

SEQ ID NO: 5320 - protein, 43 aa, Artificial Sequence
  Description of Artificial Sequence: Synthetic polypeptide
SGFTFSNYDMWWVRQAPGKGLEWVSWISSSGGATIYADSVKGR

SEQ ID NO: 5321 - protein, 43 aa, Artificial Sequence
  Description of Artificial Sequence: Synthetic polypeptide
SGFTFSNYDMWWVRQAPGKGLEWVSYISSSGGATLYADSVKGR

SEQ ID NO: 5322 - protein, 43 aa, Artificial Sequence
  Description of Artificial Sequence: Synthetic polypeptide
SGFTFSNYEMWWVRQAPGKGLEWVSVIYSSGSATFYADSVKGR

SEQ ID NO: 5323 - protein, 43 aa, Artificial Sequence
  Description of Artificial Sequence: Synthetic polypeptide
SGFTFSNYIMWWVRQAPGKGLEWVSSIYPSGGATLYADSVKGR

SEQ ID NO: 5324 - protein, 43 aa, Artificial Sequence
  Description of Artificial Sequence: Synthetic polypeptide
SGFTFSNYMMIWVRQAPGKGLEWVSSIYPSGGYTGYADSVKGR

SEQ ID NO: 5325 - protein, 43 aa, Artificial Sequence
  Description of Artificial Sequence: Synthetic polypeptide
SGFTFSNYMMIWVRQAPGKGLEWVSSIYSSGGFTSYADSVKGR

SEQ ID NO: 5326 - protein, 43 aa, Artificial Sequence
  Description of Artificial Sequence: Synthetic polypeptide
SGFTFSNYMMWWVRQAPGKGLEWVSSIGPSGGGTFYADSVKGR

SEQ ID NO: 5327 - protein, 43 aa, Artificial Sequence
  Description of Artificial Sequence: Synthetic polypeptide
SGFTFSNYMMWWVRQAPGKGLEWVSSIYSSGGGTFYADSVKGR

SEQ ID NO: 5328 - protein, 43 aa, Artificial Sequence
  Description of Artificial Sequence: Synthetic polypeptide
SGFTFSNYMMWWVRQAPGKGLEWVSVISPSGGATYYADSVKGR

SEQ ID NO: 5329 - protein, 43 aa, Artificial Sequence
  Description of Artificial Sequence: Synthetic polypeptide
SGFTFSNYNMMWVRQAPGKGLEWVSYISSSGGYTGYADSVKGR

SEQ ID NO: 5330 - protein, 43 aa, Artificial Sequence
  Description of Artificial Sequence: Synthetic polypeptide
SGFTFSNYNMWWVRQAPGKGLEWVSVIYPSGGPTFYADSVKGR

SEQ ID NO: 5331 - protein, 43 aa, Artificial Sequence
  Description of Artificial Sequence: Synthetic polypeptide
SGFTFSNYNMWWVRQAPGKGLEWVSYISPSGGGTLYADSVKGR

SEQ ID NO: 5332 - protein, 43 aa, Artificial Sequence
  Description of Artificial Sequence: Synthetic polypeptide
SGFTFSNYPMFWVRQAPGKGLEWVSYISPSGGWTSYADSVKGR

SEQ ID NO: 5333 - protein, 43 aa, Artificial Sequence
  Description of Artificial Sequence: Synthetic polypeptide
SGFTFSNYPMIWVRQAPGKGLEWVSYISPSGGGTFYADSVKGR

SEQ ID NO: 5334 - protein, 43 aa, Artificial Sequence
  Description of Artificial Sequence: Synthetic polypeptide
SGFTFSNYPMIWVRQAPGKGLEWVSYISSSGGYTGYADSVKGR

SEQ ID NO: 5335 - protein, 43 aa, Artificial Sequence
  Description of Artificial Sequence: Synthetic polypeptide
SGFTFSNYPMIWVRQAPGKGLEWVSYIVPSGGFTSYADSVKGR

SEQ ID NO: 5336 - protein, 43 aa, Artificial Sequence
  Description of Artificial Sequence: Synthetic polypeptide
SGFTFSNYPMIWVRQAPGKGLEWVSYIYPSGGGTYYADSVKGR

SEQ ID NO: 5337 - protein, 42 aa, Artificial Sequence
  Description of Artificial Sequence: Synthetic polypeptide
SGFTFSNYPMIWVRQAPGKGLEWVSYIYPSGGTFYADSVKGR

SEQ ID NO: 5338 - protein, 43 aa, Artificial Sequence
  Description of Artificial Sequence: Synthetic polypeptide
SGFTFSNYPMWWVRQAPGKGLEWVSSISPSGGSTYYADSVKGR

SEQ ID NO: 5339 - protein, 43 aa, Artificial Sequence
  Description of Artificial Sequence: Synthetic polypeptide
SGFTFSNYPMWWVRQAPGKGLEWVSSIVPSGGATYYADSVKGR

SEQ ID NO: 5340 - protein, 43 aa, Artificial Sequence
  Description of Artificial Sequence: Synthetic polypeptide
SGFTFSNYPMWWVRQAPGKGLEWVSSIYPSGGATFYADSVKGR

SEQ ID NO: 5341 - protein, 44 aa, Artificial Sequence
  Description of Artificial Sequence: Synthetic polypeptide
SGFTFSNYPMWWVRQAPGKGLEWVSSIYPSGGKATYYADSVKGR

SEQ ID NO: 5342 - protein, 43 aa, Artificial Sequence
  Description of Artificial Sequence: Synthetic polypeptide
SGFTFSNYPMWWVRQAPGKGLEWVSSIYPSGGPTFYADSVKGR

SEQ ID NO: 5343 - protein, 43 aa, Artificial Sequence
  Description of Artificial Sequence: Synthetic polypeptide
SGFTFSNYPMWWVRQAPGKGLEWVSSIYSSGGATFYADSVKGR

SEQ ID NO: 5344 - protein, 43 aa, Artificial Sequence
  Description of Artificial Sequence: Synthetic polypeptide
SGFTFSNYPMWWVRQAPGKGLEWVSVIYPSGGYTAYADSVKGR

SEQ ID NO: 5345 - protein, 43 aa, Artificial Sequence
  Description of Artificial Sequence: Synthetic polypeptide
SGFTFSNYPMWWVRQAPGKGLEWVSYIGPSGGGTLYADSVKGR

SEQ ID NO: 5346 - protein, 43 aa, Artificial Sequence
  Description of Artificial Sequence: Synthetic polypeptide
SGFTFSNYPMWWVRQAPGKGLEWVSYIRPSGGPTWYADSVKGR

SEQ ID NO: 5347 - protein, 43 aa, Artificial Sequence
  Description of Artificial Sequence: Synthetic polypeptide
SGFTFSNYPMWWVRQAPGKGLEWVSYISPSGGGTFYADSVKGR

SEQ ID NO: 5348 - protein, 43 aa, Artificial Sequence
  Description of Artificial Sequence: Synthetic polypeptide
SGFTFSNYPMWWVRQAPGKGLEWVSYISPSGGGTLYADSVKGR

SEQ ID NO: 5349 - protein, 43 aa, Artificial Sequence
  Description of Artificial Sequence: Synthetic polypeptide
SGFTFSNYPMWWVRQAPGKGLEWVSYIVPSGGATFYADSVKGR

SEQ ID NO: 5350 - protein, 43 aa, Artificial Sequence
  Description of Artificial Sequence: Synthetic polypeptide
SGFTFSNYPMWWVRQAPGKGLEWVSYIVPSGGMTYYADSVKGR

SEQ ID NO: 5351 - protein, 43 aa, Artificial Sequence
  Description of Artificial Sequence: Synthetic polypeptide
SGFTFSNYSMWWVRQAPGKGLEWVSVIYPSGGYTSYADSVKGR

SEQ ID NO: 5352 - protein, 43 aa, Artificial Sequence
  Description of Artificial Sequence: Synthetic polypeptide
SGFTFSNYYMIWVRQAPGKGLEWVSYISPSGGGTYYADSVKGR

SEQ ID NO: 5353 - protein, 43 aa, Artificial Sequence
  Description of Artificial Sequence: Synthetic polypeptide
SGFTFSPYAMWWVRQAPGKGLEWVSYISSSGGGTFYADSVKGR

SEQ ID NO: 5354 - protein, 43 aa, Artificial Sequence
  Description of Artificial Sequence: Synthetic polypeptide
SGFTFSPYDMWWVRQAPGKGLEWVSVISPSGGATFYADSVKGR

SEQ ID NO: 5355 - protein, 43 aa, Artificial Sequence
  Description of Artificial Sequence: Synthetic polypeptide
SGFTFSPYDMWWVRQAPGKGLEWVSVISPSGGYTGYADSVKGR

SEQ ID NO: 5356 - protein, 43 aa, Artificial Sequence
  Description of Artificial Sequence: Synthetic polypeptide
SGFTFSPYDMWWVRQAPGKGLEWVSVISSSGGFTDYADSVKGR

SEQ ID NO: 5357 - protein, 43 aa, Artificial Sequence
  Description of Artificial Sequence: Synthetic polypeptide
SGFTFSPYMMFWVRQAPGKGLEWVSSISSSGGGTFYADSVKGR

SEQ ID NO: 5358 - protein, 43 aa, Artificial Sequence
  Description of Artificial Sequence: Synthetic polypeptide
SGFTFSPYMMIWVRQAPGKGLEWVSSISSSGGYTGYADSVKGR

SEQ ID NO: 5359 - protein, 43 aa, Artificial Sequence
  Description of Artificial Sequence: Synthetic polypeptide
SGFTFSPYMMSWVRQAPGKGLEWVSSIYSSGGATFYADSVKGR

SEQ ID NO: 5360 - protein, 43 aa, Artificial Sequence
  Description of Artificial Sequence: Synthetic polypeptide
SGFTFSPYMMWWVRQAPGKGLEWVSSISSSGGGTFYADSVKGR

SEQ ID NO: 5361 - protein, 43 aa, Artificial Sequence
  Description of Artificial Sequence: Synthetic polypeptide
SGFTFSPYNMWWVRQAPGKGLEWVSVIYPSGGATFYADSVKGR

SEQ ID NO: 5362 - protein, 43 aa, Artificial Sequence
  Description of Artificial Sequence: Synthetic polypeptide
SGFTFSPYPMFWVRQAPGKGLEWVSSISPSGGATYYADSVKGR

SEQ ID NO: 5363 - protein, 43 aa, Artificial Sequence
  Description of Artificial Sequence: Synthetic polypeptide
SGFTFSPYPMIWVRQAPGKGLEWVSYIGSSGGYTSYADSVKGR

SEQ ID NO: 5364 - protein, 43 aa, Artificial Sequence
  Description of Artificial Sequence: Synthetic polypeptide
SGFTFSPYPMIWVRQAPGKGLEWVSYISPSGGFTDYADSVKGR

SEQ ID NO: 5365 - protein, 43 aa, Artificial Sequence
  Description of Artificial Sequence: Synthetic polypeptide
SGFTFSPYPMIWVRQAPGKGLEWVSYISPSGGGTFYADSVKGR

SEQ ID NO: 5366 - protein, 43 aa, Artificial Sequence
  Description of Artificial Sequence: Synthetic polypeptide
SGFTFSPYPMIWVRQAPGKGLEWVSYISSSGGGTYYADSVKGR

SEQ ID NO: 5367 - protein, 43 aa, Artificial Sequence
  Description of Artificial Sequence: Synthetic polypeptide
SGFTFSPYPMIWVRQAPGKGLEWVSYISSSGGYTDYADSVKGR

SEQ ID NO: 5368 - protein, 43 aa, Artificial Sequence
  Description of Artificial Sequence: Synthetic polypeptide
SGFTFSPYPMWWVRQAPGKGLEWVSYISPSGGWTDYADSVKGR

SEQ ID NO: 5369 - protein, 43 aa, Artificial Sequence
  Description of Artificial Sequence: Synthetic polypeptide
SGFTFSPYPMWWVRQAPGKGLEWVSYIVPSGGKTFYADSVKGR

SEQ ID NO: 5370 - protein, 43 aa, Artificial Sequence
  Description of Artificial Sequence: Synthetic polypeptide
SGFTFSQYAMIWVRQAPGKGLEWVSYISPSGGYTGYADSVKGR

SEQ ID NO: 5371 - protein, 43 aa, Artificial Sequence
  Description of Artificial Sequence: Synthetic polypeptide
SGFTFSQYDMIWVRQAPGKGLEWVSYIGSSGGSTIYADSVKGR

SEQ ID NO: 5372 - protein, 43 aa, Artificial Sequence
  Description of Artificial Sequence: Synthetic polypeptide
SGFTFSQYDMWWFRQAPGKGLEWVSVISPSGGHTSYADSVKGR

SEQ ID NO: 5373 - protein, 43 aa, Artificial Sequence
  Description of Artificial Sequence: Synthetic polypeptide
SGFTFSQYDMWWVRQAPGKGLEWVSVISSSGGATWYADSVKGR

SEQ ID NO: 5374 - protein, 43 aa, Artificial Sequence
  Description of Artificial Sequence: Synthetic polypeptide
SGFTFSQYDMWWVRQAPGKGLEWVSVIYPSGGPTFYADSVKGR

SEQ ID NO: 5375 - protein, 43 aa, Artificial Sequence
  Description of Artificial Sequence: Synthetic polypeptide
SGFTFSQYDMWWVRQAPGKGLEWVSVIYPSGGTTFYADSVKGR

SEQ ID NO: 5376 - protein, 43 aa, Artificial Sequence
  Description of Artificial Sequence: Synthetic polypeptide
SGFTFSQYDMWWVRQAPGKGLEWVSVIYPSGGYTDYADSVKGR

SEQ ID NO: 5377 - protein, 42 aa, Artificial Sequence
  Description of Artificial Sequence: Synthetic polypeptide
SGFTFSQYDMWWVRQAPGKGLEWVSVIYPSGTTFYADSVKGR

SEQ ID NO: 5378 - protein, 43 aa, Artificial Sequence
  Description of Artificial Sequence: Synthetic polypeptide
SGFTFSQYDMWWVRQAPGKGLEWVSYIVPSGGFTDYADSVKGR

SEQ ID NO: 5379 - protein, 43 aa, Artificial Sequence
  Description of Artificial Sequence: Synthetic polypeptide
SGFTFSQYGMWWVRQAPGKGLEWVSYIYPSGGGTYYADSVKGR

SEQ ID NO: 5380 - protein, 43 aa, Artificial Sequence
  Description of Artificial Sequence: Synthetic polypeptide
SGFTFSQYMMIWVRQAPGKGLEWVSYIVPSGGTTGYADSVKGR

SEQ ID NO: 5381 - protein, 43 aa, Artificial Sequence
  Description of Artificial Sequence: Synthetic polypeptide
SGFTFSQYPMFWVRQAPGKGLEWVSYIVPSGGYTSYADSVKGR

SEQ ID NO: 5382 - protein, 43 aa, Artificial Sequence
  Description of Artificial Sequence: Synthetic polypeptide
SGFTFSQYPMIWVRQAPGKGLEWVSYIVPSGGWTSYADSVKGR

SEQ ID NO: 5383 - protein, 43 aa, Artificial Sequence
  Description of Artificial Sequence: Synthetic polypeptide
SGFTFSQYPMMWVRQAPGKGLEWVSYIYPSGGATYYADSVKGR

SEQ ID NO: 5384 - protein, 43 aa, Artificial Sequence
  Description of Artificial Sequence: Synthetic polypeptide
SGFTFSQYPMMWVRQAPGKGLEWVSYIYPSGGGTYYADSVKGR

SEQ ID NO: 5385 - protein, 43 aa, Artificial Sequence
  Description of Artificial Sequence: Synthetic polypeptide
SGFTFSQYPMWWVRQAPGKGLEWVSSISPSGGATYYADSVKGR

SEQ ID NO: 5386 - protein, 43 aa, Artificial Sequence
  Description of Artificial Sequence: Synthetic polypeptide
SGFTFSQYPMWWVRQAPGKGLEWVSSIYPSGGGTFYADSVKGR

SEQ ID NO: 5387 - protein, 43 aa, Artificial Sequence
  Description of Artificial Sequence: Synthetic polypeptide
SGFTFSQYPMWWVRQAPGKGLEWVSSIYSSGGATYYADSVKGR

SEQ ID NO: 5388 - protein, 43 aa, Artificial Sequence
  Description of Artificial Sequence: Synthetic polypeptide
SGFTFSQYPMWWVRQAPGKGLEWVSVIYPSGGFTSYADSVKGR

SEQ ID NO: 5389 - protein, 43 aa, Artificial Sequence
  Description of Artificial Sequence: Synthetic polypeptide
SGFTFSQYPMWWVRQAPGKGLEWVSVIYPSGGYTGYADSVKGR

SEQ ID NO: 5390 - protein, 43 aa, Artificial Sequence
  Description of Artificial Sequence: Synthetic polypeptide
SGFTFSQYQMWWVRQAPGKGLEWVSVIYPSGGATYYADSVKGR

SEQ ID NO: 5391 - protein, 43 aa, Artificial Sequence
  Description of Artificial Sequence: Synthetic polypeptide
SGFTFSQYSMIWVRQAPGKGLEWVSYIVPSGGYTSYADSVKGR

SEQ ID NO: 5392 - protein, 43 aa, Artificial Sequence
  Description of Artificial Sequence: Synthetic polypeptide
SGFTFSQYSMWWVRQAPGKGLEWVSSIVPSGGATFYADSVKGR

SEQ ID NO: 5393 - protein, 43 aa, Artificial Sequence
  Description of Artificial Sequence: Synthetic polypeptide
SGFTFSQYSMWWVRQAPGKGLEWVSVIYSSGGATFYADSVKGR

SEQ ID NO: 5394 - protein, 43 aa, Artificial Sequence
  Description of Artificial Sequence: Synthetic polypeptide
SGFTFSQYSMWWVRQAPGKGLEWVSVIYSSGSATFYADSVKGR

SEQ ID NO: 5395 - protein, 43 aa, Artificial Sequence
  Description of Artificial Sequence: Synthetic polypeptide
SGFTFSQYWMWWVRQAPGKGLEWVSVISSSGGGTYYADSVKGR

SEQ ID NO: 5396 - protein, 43 aa, Artificial Sequence
  Description of Artificial Sequence: Synthetic polypeptide
SGFTFSQYWMWWVRQAPGKGLEWVSVIVPSGGKTFYADSVKGR

SEQ ID NO: 5397 - protein, 43 aa, Artificial Sequence
  Description of Artificial Sequence: Synthetic polypeptide
SGFTFSRYAMIWVRQAPGKGLEWVSYISPSGGFTDYADSVKGR

SEQ ID NO: 5398 - protein, 43 aa, Artificial Sequence
  Description of Artificial Sequence: Synthetic polypeptide
SGFTFSRYAMMWVRQAPGKGLEWVSYISPSGGFTDYADSVKGR

SEQ ID NO: 5399 - protein, 43 aa, Artificial Sequence
  Description of Artificial Sequence: Synthetic polypeptide
SGFTFSRYAMWWVRQAPGKGLEWVSSIYPSGGGTFYADSVKGR

SEQ ID NO: 5400 - protein, 43 aa, Artificial Sequence
  Description of Artificial Sequence: Synthetic polypeptide
SGFTFSRYAMWWVRQAPGKGLEWVSYIVPSGGYTDYADSVKGR

SEQ ID NO: 5401 - protein, 43 aa, Artificial Sequence
  Description of Artificial Sequence: Synthetic polypeptide
SGFTFSRYDMFWVRQAPGKGLEWVSSISPSGGGTYYADSVKGR

SEQ ID NO: 5402 - protein, 43 aa, Artificial Sequence
  Description of Artificial Sequence: Synthetic polypeptide
SGFTFSRYDMWWVRQAPGKGLEWVSSISSSGGFTGYADSVKGR

SEQ ID NO: 5403 - protein, 43 aa, Artificial Sequence
  Description of Artificial Sequence: Synthetic polypeptide
SGFTFSRYDMWWVRQAPGKGLEWVSVISPSGGATFYADSVKGR

SEQ ID NO: 5404 - protein, 43 aa, Artificial Sequence
  Description of Artificial Sequence: Synthetic polypeptide
SGFTFSRYDMWWVRQAPGKGLEWVSVIYPSGGHTMYADSVKGR

SEQ ID NO: 5405 - protein, 43 aa, Artificial Sequence
  Description of Artificial Sequence: Synthetic polypeptide
SGFTFSRYDMWWVRQAPGKGLEWVSWISPSGGGTQYADSVKGR

SEQ ID NO: 5406 - protein, 43 aa, Artificial Sequence
  Description of Artificial Sequence: Synthetic polypeptide
SGFTFSRYDMWWVRQAPGKGLEWVSYIVPSGGFTSYADSVKGR

SEQ ID NO: 5407 - protein, 43 aa, Artificial Sequence
  Description of Artificial Sequence: Synthetic polypeptide
SGFTFSRYHMWWVRQAPGKGLEWVSYISPSGGSTLYADSVKGR

SEQ ID NO: 5408 - protein, 43 aa, Artificial Sequence
  Description of Artificial Sequence: Synthetic polypeptide
SGFTFSRYMMIWVRQAPGKGLEWVSGIYPSGGWTDYADSVKGR

SEQ ID NO: 5409 - protein, 43 aa, Artificial Sequence
  Description of Artificial Sequence: Synthetic polypeptide
SGFTFSRYNMWWVRQAPGKGLEWVSVIYPSGGATYYADSVKGR

SEQ ID NO: 5410 - protein, 43 aa, Artificial Sequence
  Description of Artificial Sequence: Synthetic polypeptide
SGFTFSRYPMFWVRQAPGKGLEWVSYISPSGGYTSYADSVKGR

SEQ ID NO: 5411 - protein, 43 aa, Artificial Sequence
  Description of Artificial Sequence: Synthetic polypeptide
SGFTFSRYPMFWVRQAPGKGLEWVSYIVPSGGYTDYADSVKGR

SEQ ID NO: 5412 - protein, 43 aa, Artificial Sequence
  Description of Artificial Sequence: Synthetic polypeptide
SGFTFSRYPMIWVRQAPGKGLEWVSYIYPSGGGTYYADSVKGR

SEQ ID NO: 5413 - protein, 43 aa, Artificial Sequence
  Description of Artificial Sequence: Synthetic polypeptide
SGFTFSRYPMVWVRQAPGKGLEWVSYISPSGGYTGYADSVKGR

SEQ ID NO: 5414 - protein, 43 aa, Artificial Sequence
  Description of Artificial Sequence: Synthetic polypeptide
SGFTFSRYPMWWVRQAPGKGLEWVSSISSSGGGTYYADSVKGR

SEQ ID NO: 5415 - protein, 43 aa, Artificial Sequence
  Description of Artificial Sequence: Synthetic polypeptide
SGFTFSRYPMWWVRQAPGKGLEWVSSIYPSGGATFYADSVKGR

SEQ ID NO: 5416 - protein, 43 aa, Artificial Sequence
  Description of Artificial Sequence: Synthetic polypeptide
SGFTFSRYPMWWVRQAPGKGLEWVSVIYPSGGATYYADSVKGR

SEQ ID NO: 5417 - protein, 43 aa, Artificial Sequence
  Description of Artificial Sequence: Synthetic polypeptide
SGFTFSRYPMWWVRQAPGKGLEWVSVIYPSGGTTFYADSVKGR

SEQ ID NO: 5418 - protein, 43 aa, Artificial Sequence
  Description of Artificial Sequence: Synthetic polypeptide
SGFTFSRYPMWWVRQAPGKGLEWVSVIYSSGGYTGYADSVKGR

SEQ ID NO: 5419 - protein, 43 aa, Artificial Sequence
  Description of Artificial Sequence: Synthetic polypeptide
SGFTFSRYPMWWVRQAPGKGLEWVSYIGSSGGGTFYADSVKGR

SEQ ID NO: 5420 - protein, 43 aa, Artificial Sequence
  Description of Artificial Sequence: Synthetic polypeptide
SGFTFSRYPMWWVRQAPGKGLEWVSYISPSGGGTLYADSVKGR

SEQ ID NO: 5421 - protein, 43 aa, Artificial Sequence
  Description of Artificial Sequence: Synthetic polypeptide
SGFTFSRYPMWWVRQAPGKGLEWVSYISPSGGMTSYADSVKGR

SEQ ID NO: 5422 - protein, 43 aa, Artificial Sequence
  Description of Artificial Sequence: Synthetic polypeptide
SGFTFSRYPMWWVRQAPGKGLEWVSYISSSGGGTFYADSVKGR

SEQ ID NO: 5423 - protein, 43 aa, Artificial Sequence
  Description of Artificial Sequence: Synthetic polypeptide
SGFTFSRYPMWWVRQAPGKGLEWVSYISSSGGGTLYADSVKGR

SEQ ID NO: 5424 - protein, 43 aa, Artificial Sequence
  Description of Artificial Sequence: Synthetic polypeptide
SGFTFSRYPMWWVRQAPGKGLEWVSYIVPSGGATYYADSVKGR

SEQ ID NO: 5425 - protein, 43 aa, Artificial Sequence
  Description of Artificial Sequence: Synthetic polypeptide
SGFTFSRYPMWWVRQAPGKGLEWVSYIVPSGGFTDYAHSVKGR

SEQ ID NO: 5426 - protein, 43 aa, Artificial Sequence
  Description of Artificial Sequence: Synthetic polypeptide
SGFTFSRYPMWWVRQAPGKGLEWVSYIVPSGGTTYYADSVKGR

SEQ ID NO: 5427 - protein, 43 aa, Artificial Sequence
  Description of Artificial Sequence: Synthetic polypeptide
SGFTFSRYPMWWVRQAPGKGLEWVSYIYPSGGATFYADSVKGR

SEQ ID NO: 5428 - protein, 43 aa, Artificial Sequence
  Description of Artificial Sequence: Synthetic polypeptide
SGFTFSRYPMWWVRQAPGKGLEWVSYIYSSGGKTFYADSVKGR

SEQ ID NO: 5429 - protein, 43 aa, Artificial Sequence
  Description of Artificial Sequence: Synthetic polypeptide
SGFTFSRYSMWWVRQAPGKGLEWVSSIYPSGGATFYADSVKGR

SEQ ID NO: 5430 - protein, 43 aa, Artificial Sequence
  Description of Artificial Sequence: Synthetic polypeptide
SGFTFSRYSMWWVRQAPGKGLEWVSVIYPSGGYTGYADSVKGR

SEQ ID NO: 5431 - protein, 43 aa, Artificial Sequence
  Description of Artificial Sequence: Synthetic polypeptide
SGFTFSRYWMWWVRQAPGKGLEWVSVIVPSGGATFYADSVKGR

SEQ ID NO: 5432 - protein, 43 aa, Artificial Sequence
  Description of Artificial Sequence: Synthetic polypeptide
SGFTFSRYYMMWVRQAPGKGLEWVSYISPSGGATYYADSVKGR

SEQ ID NO: 5433 - protein, 43 aa, Artificial Sequence
  Description of Artificial Sequence: Synthetic polypeptide
SGFTFSSYDMIWVRQAPGKGLEWVSWIGPSGGSTMYADSVKGR

SEQ ID NO: 5434 - protein, 43 aa, Artificial Sequence
  Description of Artificial Sequence: Synthetic polypeptide
SGFTFSSYDMWWVRQAPGKGLEWVSSISSSVGATYYADSVKGR

SEQ ID NO: 5435 - protein, 43 aa, Artificial Sequence
  Description of Artificial Sequence: Synthetic polypeptide
SGFTFSSYDMWWVRQAPGKGLEWVSVIGPSGGGTFYADSVKGR

SEQ ID NO: 5436 - protein, 43 aa, Artificial Sequence
  Description of Artificial Sequence: Synthetic polypeptide
SGFTFSSYDMWWVRQAPGKGLEWVSVISPSGGYTGYADSVKGR

SEQ ID NO: 5437 - protein, 43 aa, Artificial Sequence
  Description of Artificial Sequence: Synthetic polypeptide
SGFTFSSYDMWWVRQAPGKGLEWVSVIYPSGGRTYYADSVKGR

SEQ ID NO: 5438 - protein, 43 aa, Artificial Sequence
  Description of Artificial Sequence: Synthetic polypeptide
SGFTFSSYDMWWVRQAPGKGLEWVSVIYSSGGFTGYADSVKGR

SEQ ID NO: 5439 - protein, 43 aa, Artificial Sequence
  Description of Artificial Sequence: Synthetic polypeptide
SGFTFSSYDMWWVRQAPGKGLEWVSVIYSSGGTTFYADSVKGR

SEQ ID NO: 5440 - protein, 43 aa, Artificial Sequence
  Description of Artificial Sequence: Synthetic polypeptide
SGFTFSSYDMWWVRQAPGKGLEWVSVIYSSGGYTGYADSVKGR

SEQ ID NO: 5441 - protein, 43 aa, Artificial Sequence
  Description of Artificial Sequence: Synthetic polypeptide
SGFTFSSYEMWWVRQAPGKGLEWVSVIYSSGGATFYADSVKGR

SEQ ID NO: 5442 - protein, 43 aa, Artificial Sequence
  Description of Artificial Sequence: Synthetic polypeptide
SGFTFSSYEMWWVRQAPGKGLEWVSYISSSGGGTYYADSVKGR

SEQ ID NO: 5443 - protein, 43 aa, Artificial Sequence
  Description of Artificial Sequence: Synthetic polypeptide
SGFTFSSYMMIWVRQAPGKGLEWVSSISPSGGGTYYADSVKGR

SEQ ID NO: 5444 - protein, 43 aa, Artificial Sequence
  Description of Artificial Sequence: Synthetic polypeptide
SGFTFSSYMMIWVRQAPGKGLEWVSSISPSGGWTSYADSVKGR

SEQ ID NO: 5445 - protein, 43 aa, Artificial Sequence
  Description of Artificial Sequence: Synthetic polypeptide
SGFTFSSYMMIWVRQAPGKGLEWVSSIYPSGGYTSYADSVKGR

SEQ ID NO: 5446 - protein, 43 aa, Artificial Sequence
  Description of Artificial Sequence: Synthetic polypeptide
SGFTFSSYNMWWVRQAPGKGLEWVSSISPSGGGTYYADSVKGR

SEQ ID NO: 5447 - protein, 43 aa, Artificial Sequence
  Description of Artificial Sequence: Synthetic polypeptide
SGFTFSSYPMIWVRQAPGKGLEWVSYISSSGGFTDYADSVKGR

SEQ ID NO: 5448 - protein, 43 aa, Artificial Sequence
  Description of Artificial Sequence: Synthetic polypeptide
SGFTFSSYPMMWVRQAPGKGLEWVSYIYSSGGGTFYADSVKGR

SEQ ID NO: 5449 - protein, 43 aa, Artificial Sequence
  Description of Artificial Sequence: Synthetic polypeptide
SGFTFSSYPMWWVRQAPGKGLEWVSSISPSGGGTYYADSVKGR

SEQ ID NO: 5450 - protein, 42 aa, Artificial Sequence
  Description of Artificial Sequence: Synthetic polypeptide
SGFTFSSYPMWWVRQAPGKGLEWVSSISPSGMTYYADSVKGR

SEQ ID NO: 5451 - protein, 43 aa, Artificial Sequence
  Description of Artificial Sequence: Synthetic polypeptide
SGFTFSSYPMWWVRQAPGKGLEWVSSIYPSGGGTFYADSVKGR

SEQ ID NO: 5452 - protein, 43 aa, Artificial Sequence
  Description of Artificial Sequence: Synthetic polypeptide
SGFTFSSYPMWWVRQAPGKGLEWVSYISSSGGGTYYADSVKGR

SEQ ID NO: 5453 - protein, 43 aa, Artificial Sequence
  Description of Artificial Sequence: Synthetic polypeptide
SGFTFSSYPMWWVRQAPGKGLEWVSYIVPSGGATFYADSVKGR

SEQ ID NO: 5454 - protein, 43 aa, Artificial Sequence
  Description of Artificial Sequence: Synthetic polypeptide
SGFTFSSYPMWWVRQAPGKGLEWVSYIVPSGGSTLYADSVKGR

SEQ ID NO: 5455 - protein, 43 aa, Artificial Sequence
  Description of Artificial Sequence: Synthetic polypeptide
SGFTFSSYPMWWVRQAPGKGLEWVSYIVPSGGYTYYADSVKGR

SEQ ID NO: 5456 - protein, 43 aa, Artificial Sequence
  Description of Artificial Sequence: Synthetic polypeptide
SGFTFSSYQMWWVRQAPGKGLEWVSSIYPSGGATFYADSVKGR

SEQ ID NO: 5457 - protein, 43 aa, Artificial Sequence
  Description of Artificial Sequence: Synthetic polypeptide
SGFTFSSYSMWWVRQAPGKGLEWVSVIYSSGGYTGYADSVKGR

SEQ ID NO: 5458 - protein, 43 aa, Artificial Sequence
  Description of Artificial Sequence: Synthetic polypeptide
SGFTFSTYAMIWVRQAPGKGLEWVSYIGPSGGFTDYADSVKGR

SEQ ID NO: 5459 - protein, 43 aa, Artificial Sequence
  Description of Artificial Sequence: Synthetic polypeptide
SGFTFSTYAMWWVRQAPGKGLEWVSYISPSGGGTFYADSVKGR

SEQ ID NO: 5460 - protein, 43 aa, Artificial Sequence
  Description of Artificial Sequence: Synthetic polypeptide
SGFTFSTYDMFWVRQAPGKGLEWVSSISSSGGATFYADSVKGR

SEQ ID NO: 5461 - protein, 43 aa, Artificial Sequence
  Description of Artificial Sequence: Synthetic polypeptide
SGFTFSTYDMIWVRQAPGKGLEWVSYISPSGGYTGYADSVKGR

SEQ ID NO: 5462 - protein, 43 aa, Artificial Sequence
  Description of Artificial Sequence: Synthetic polypeptide
SGFTFSTYDMIWVRQAPGKGLEWVSYISSSGGFTDYADSVKGR

SEQ ID NO: 5463 - protein, 43 aa, Artificial Sequence
  Description of Artificial Sequence: Synthetic polypeptide
SGFTFSTYDMWWVRQAPGKGLEWVSVIYPSGGPTYYADSVKGR

SEQ ID NO: 5464 - protein, 43 aa, Artificial Sequence
  Description of Artificial Sequence: Synthetic polypeptide
SGFTFSTYDMWWVRQAPGKGLEWVSYISSSGGGTFYADSVKGR

SEQ ID NO: 5465 - protein, 43 aa, Artificial Sequence
  Description of Artificial Sequence: Synthetic polypeptide
SGFTFSTYEMWWVRQAPGKGLEWVSYISSSGGGTGYADSVKGR

SEQ ID NO: 5466 - protein, 43 aa, Artificial Sequence
  Description of Artificial Sequence: Synthetic polypeptide
SGFTFSTYPMFWVRQAPGKGLEWVSYISPSGGYTDYADSVKGR

SEQ ID NO: 5467 - protein, 43 aa, Artificial Sequence
  Description of Artificial Sequence: Synthetic polypeptide
SGFTFSTYPMIWVRQAPGKGLEWVSYIVPSGGYTGYADSVKGR

SEQ ID NO: 5468 - protein, 43 aa, Artificial Sequence
  Description of Artificial Sequence: Synthetic polypeptide
SGFTFSTYPMMWVRQAPGKGLEWVSYIYPSGGATFYADSVKGR

SEQ ID NO: 5469 - protein, 43 aa, Artificial Sequence
  Description of Artificial Sequence: Synthetic polypeptide
SGFTFSTYPMWWVRQAPGKGLEWVSSISPSGGATYYADSVKGR

SEQ ID NO: 5470 - protein, 43 aa, Artificial Sequence
  Description of Artificial Sequence: Synthetic polypeptide
SGFTFSTYPMWWVRQAPGKGLEWVSSIVPSGGATYYADSVKGR

SEQ ID NO: 5471 - protein, 43 aa, Artificial Sequence
  Description of Artificial Sequence: Synthetic polypeptide
SGFTFSTYPMWWVRQAPGKGLEWVSVIYSSGGYTGYADSVKGR

SEQ ID NO: 5472 - protein, 43 aa, Artificial Sequence
  Description of Artificial Sequence: Synthetic polypeptide
SGFTFSTYPMWWVRQAPGKGLEWVSYISPSGGATFYADSVKGR

SEQ ID NO: 5473 - protein, 43 aa, Artificial Sequence
  Description of Artificial Sequence: Synthetic polypeptide
SGFTFSTYPMWWVRQAPGKGLEWVSYISPSGGGTFYADSVKGR

SEQ ID NO: 5474 - protein, 43 aa, Artificial Sequence
  Description of Artificial Sequence: Synthetic polypeptide
SGFTFSTYPMWWVRQAPGKGLEWVSYIVPSGGYTDYADSVKGR

SEQ ID NO: 5475 - protein, 43 aa, Artificial Sequence
  Description of Artificial Sequence: Synthetic polypeptide
SGFTFSTYPMWWVRQAPGKGLEWVSYIYPSGGGTFYADSVKGR

SEQ ID NO: 5476 - protein, 42 aa, Artificial Sequence
  Description of Artificial Sequence: Synthetic polypeptide
SGFTFSTYQMWWVRQAPGKGLEWVSSIYSSGGTFYADSVKGR

SEQ ID NO: 5477 - protein, 43 aa, Artificial Sequence
  Description of Artificial Sequence: Synthetic polypeptide
SGFTFSTYSMIWVRQAPGKGLEWVSYISPSGGFTDYADSVKGR

SEQ ID NO: 5478 - protein, 43 aa, Artificial Sequence
  Description of Artificial Sequence: Synthetic polypeptide
SGFTFSVYDMIWVRQAPGKGLEWVSYIGPSGGMTLYADSVKGR

SEQ ID NO: 5479 - protein, 43 aa, Artificial Sequence
  Description of Artificial Sequence: Synthetic polypeptide
SGFTFSVYDMWWVRQAPGKGLEWVSVIYPSGGATYYADSVKGR

SEQ ID NO: 5480 - protein, 43 aa, Artificial Sequence
  Description of Artificial Sequence: Synthetic polypeptide
SGFTFSVYDMWWVRQAPGKGLEWVSVIYPSGGYTDYADSVKGR

SEQ ID NO: 5481 - protein, 43 aa, Artificial Sequence
  Description of Artificial Sequence: Synthetic polypeptide
SGFTFSVYDMWWVRQAPGKGLEWVSVIYSSGGATFYADSVKGR

SEQ ID NO: 5482 - protein, 43 aa, Artificial Sequence
  Description of Artificial Sequence: Synthetic polypeptide
SGFTFSVYDMWWVRQAPGKGLEWVSVIYSSGGPTFYADSVKGR

SEQ ID NO: 5483 - protein, 43 aa, Artificial Sequence
  Description of Artificial Sequence: Synthetic polypeptide
SGFTFSVYDMWWVRQAPGKGLEWVSYISPSGGFTDYADSVKGR

SEQ ID NO: 5484 - protein, 43 aa, Artificial Sequence
  Description of Artificial Sequence: Synthetic polypeptide
SGFTFSVYEMWWVRQAPGKGLEWVSYISPSGGGTFYADSVKGR

SEQ ID NO: 5485 - protein, 43 aa, Artificial Sequence
  Description of Artificial Sequence: Synthetic polypeptide
SGFTFSVYNMWWVRQAPGKGLEWVSSISPSGGGTFYADSVKGR

SEQ ID NO: 5486 - protein, 43 aa, Artificial Sequence
  Description of Artificial Sequence: Synthetic polypeptide
SGFTFSVYPMWWVRQAPGKGLEWVSSISPSGGATYYADSVKGR

SEQ ID NO: 5487 - protein, 43 aa, Artificial Sequence
  Description of Artificial Sequence: Synthetic polypeptide
SGFTFSVYPMWWVRQAPGKGLEWVSSISPSGGYTGYADSVKGR

SEQ ID NO: 5488 - protein, 42 aa, Artificial Sequence
  Description of Artificial Sequence: Synthetic polypeptide
SGFTFSVYPMWWVRQAPGKGLEWVSSISSGGATYYADSVKGR

SEQ ID NO: 5489 - protein, 43 aa, Artificial Sequence
  Description of Artificial Sequence: Synthetic polypeptide
SGFTFSVYPMWWVRQAPGKGLEWVSWISPSGGGTFYADSVKGR

SEQ ID NO: 5490 - protein, 43 aa, Artificial Sequence
  Description of Artificial Sequence: Synthetic polypeptide
SGFTFSVYPMWWVRQAPGKGLEWVSWISSSGGGTAYADSVKGR

SEQ ID NO: 5491 - protein, 43 aa, Artificial Sequence
  Description of Artificial Sequence: Synthetic polypeptide
SGFTFSVYPMWWVRQAPGKGLEWVSYIVPSGGATYYADSVKGR

SEQ ID NO: 5492 - protein, 43 aa, Artificial Sequence
  Description of Artificial Sequence: Synthetic polypeptide
SGFTFSVYPMWWVRQAPGKGLEWVSYIYPSGGATYYADSVKGR

SEQ ID NO: 5493 - protein, 43 aa, Artificial Sequence
  Description of Artificial Sequence: Synthetic polypeptide
SGFTFSVYQMWWVRQAPGKGLEWVSVIYPSGGTTFYADSVKGR

SEQ ID NO: 5494 - protein, 43 aa, Artificial Sequence
  Description of Artificial Sequence: Synthetic polypeptide
SGFTFSVYWMIWVRQAPGKGLEWVSYISPSGGGTFYADSVKGR

SEQ ID NO: 5495 - protein, 43 aa, Artificial Sequence
  Description of Artificial Sequence: Synthetic polypeptide
SGFTFSWYAMWWVRQAPGKGLEWVSSISPSGGGTYYADSVKGR

SEQ ID NO: 5496 - protein, 43 aa, Artificial Sequence
  Description of Artificial Sequence: Synthetic polypeptide
SGFTFSWYDMFWVRQAPGKGLEWVSSISPSGGATFYADSVKGR

SEQ ID NO: 5497 - protein, 43 aa, Artificial Sequence
  Description of Artificial Sequence: Synthetic polypeptide
SGFTFSWYDMWWVRQAPGKGLEWVSVIYPSGGATYYADSVKGR

SEQ ID NO: 5498 - protein, 43 aa, Artificial Sequence
  Description of Artificial Sequence: Synthetic polypeptide
SGFTFSWYDMWWVRQAPGKGLEWVSVIYPSGGFTDYADSVKGR

SEQ ID NO: 5499 - protein, 43 aa, Artificial Sequence
  Description of Artificial Sequence: Synthetic polypeptide
SGFTFSWYDMWWVRQAPGKGLEWVSVIYPSGGYTGYADSVKGR

SEQ ID NO: 5500 - protein, 43 aa, Artificial Sequence
  Description of Artificial Sequence: Synthetic polypeptide
SGFTFSWYDMWWVRQAPGKGLEWVSVIYSSGGATFYADSVKGR

SEQ ID NO: 5501 - protein, 43 aa, Artificial Sequence
  Description of Artificial Sequence: Synthetic polypeptide
SGFTFSWYDMWWVRQAPGKGLEWVSVIYSSGGPTFYADSVKGR

SEQ ID NO: 5502 - protein, 43 aa, Artificial Sequence
  Description of Artificial Sequence: Synthetic polypeptide
SGFTFSWYEMWWVRQAPGKGLEWVSWISPSGGGTQYADSVKGR

SEQ ID NO: 5503 - protein, 43 aa, Artificial Sequence
  Description of Artificial Sequence: Synthetic polypeptide
SGFTFSWYEMWWVRQAPGKGLEWVSYISPSGGGTYYADSVKGR

SEQ ID NO: 5504 - protein, 43 aa, Artificial Sequence
  Description of Artificial Sequence: Synthetic polypeptide
SGFTFSWYNMWWVRQAPGKGLEWVSVIYPSGGGTFYADSVKGR

SEQ ID NO: 5505 - protein, 43 aa, Artificial Sequence
  Description of Artificial Sequence: Synthetic polypeptide
SGFTFSWYNMWWVRQAPGKGLEWVSYIVSSGGFTDYADSVKGR

SEQ ID NO: 5506 - protein, 43 aa, Artificial Sequence
  Description of Artificial Sequence: Synthetic polypeptide
SGFTFSWYPMIWVRQAPGKGLEWVSYISSSGGYTSYADSVKGR

SEQ ID NO: 5507 - protein, 43 aa, Artificial Sequence
  Description of Artificial Sequence: Synthetic polypeptide
SGFTFSWYPMTWVRQAPGKGLEWVSYISPSGGYTGYADSVKGR

SEQ ID NO: 5508 - protein, 43 aa, Artificial Sequence
  Description of Artificial Sequence: Synthetic polypeptide
SGFTFSWYPMVWVRQAPGKGLEWVSYIYPSGGGTFYADSVKGR

SEQ ID NO: 5509 - protein, 43 aa, Artificial Sequence
  Description of Artificial Sequence: Synthetic polypeptide
SGFTFSWYPMWWVRQAPGKGLEWVSSISPSGGATYYADSVKGR

SEQ ID NO: 5510 - protein, 43 aa, Artificial Sequence
  Description of Artificial Sequence: Synthetic polypeptide
SGFTFSWYPMWWVRQAPGKGLEWVSSIVPSGGATYYADSVKGR

SEQ ID NO: 5511 - protein, 43 aa, Artificial Sequence
  Description of Artificial Sequence: Synthetic polypeptide
SGFTFSWYPMWWVRQAPGKGLEWVSVIYPSGGYTSYADSVKGR

SEQ ID NO: 5512 - protein, 43 aa, Artificial Sequence
  Description of Artificial Sequence: Synthetic polypeptide
SGFTFSWYPMWWVRQAPGKGLEWVSVIYSSGGATFYADSVKGR

SEQ ID NO: 5513 - protein, 43 aa, Artificial Sequence
  Description of Artificial Sequence: Synthetic polypeptide
SGFTFSWYPMWWVRQAPGKGLEWVSVIYSSGGYTGYADSVKGR

SEQ ID NO: 5514 - protein, 43 aa, Artificial Sequence
  Description of Artificial Sequence: Synthetic polypeptide
SGFTFSWYPMWWVRQAPGKGLEWVSYIVPSGGATFYADSVKGR

SEQ ID NO: 5515 - protein, 43 aa, Artificial Sequence
  Description of Artificial Sequence: Synthetic polypeptide
SGFTFSWYPMWWVRQAPGKGLEWVSYIVPSGGRTYYADSVKGR

SEQ ID NO: 5516 - protein, 43 aa, Artificial Sequence
  Description of Artificial Sequence: Synthetic polypeptide
SGFTFSWYSMWWVRQAPGKGLEWVSVIYPSGGGTFYADSVKGR

SEQ ID NO: 5517 - protein, 43 aa, Artificial Sequence
  Description of Artificial Sequence: Synthetic polypeptide
SGFTFSWYTMWWVRQAPGKGLEWVSSISPSGGGTYYADSVKGR

SEQ ID NO: 5518 - protein, 43 aa, Artificial Sequence
  Description of Artificial Sequence: Synthetic polypeptide
SGFTFSWYYMIWVRQAPGKGLEWVSYISPSGGGTYYADSVKGR

SEQ ID NO: 5519 - protein, 43 aa, Artificial Sequence
  Description of Artificial Sequence: Synthetic polypeptide
SGFTFSYYDMIWVRQAPGKGLEWVSWISPSGGLTMYADSVKGR

SEQ ID NO: 5520 - protein, 43 aa, Artificial Sequence
  Description of Artificial Sequence: Synthetic polypeptide
SGFTFSYYDMIWVRQAPGKGLEWVSYIVPSGGYTSYADSVKGR

SEQ ID NO: 5521 - protein, 43 aa, Artificial Sequence
  Description of Artificial Sequence: Synthetic polypeptide
SGFTFSYYDMVWVRQAPGKGLEWVSYISPSGGFTLYADSVKGR

SEQ ID NO: 5522 - protein, 43 aa, Artificial Sequence
  Description of Artificial Sequence: Synthetic polypeptide
SGFTFSYYDMWWVRQAPGKGLEWVSSISPSGGFTGYADSVKGR

SEQ ID NO: 5523 - protein, 43 aa, Artificial Sequence
  Description of Artificial Sequence: Synthetic polypeptide
SGFTFSYYDMWWVRQAPGKGLEWVSVISSSGGGTFYADSVKGR

SEQ ID NO: 5524 - protein, 43 aa, Artificial Sequence
  Description of Artificial Sequence: Synthetic polypeptide
SGFTFSYYDMWWVRQAPGKGLEWVSVIYPSGGTTFYADSVKGR

SEQ ID NO: 5525 - protein, 43 aa, Artificial Sequence
  Description of Artificial Sequence: Synthetic polypeptide
SGFTFSYYDMWWVRQAPGKGLEWVSVIYPSGGYTAYADSVKGR

SEQ ID NO: 5526 - protein, 43 aa, Artificial Sequence
  Description of Artificial Sequence: Synthetic polypeptide
SGFTFSYYDMWWVRQAPGKGLEWVSYISSSGGGTYYADSVKGR

SEQ ID NO: 5527 - protein, 43 aa, Artificial Sequence
  Description of Artificial Sequence: Synthetic polypeptide
SGFTFSYYEMWWVRQAPGKGLEWVSYISSSGGFTSYADSVKGR

SEQ ID NO: 5528 - protein, 43 aa, Artificial Sequence
  Description of Artificial Sequence: Synthetic polypeptide
SGFTFSYYGMWWVRQAPGKGLEWVSVISPSGGGTFYADSVKGR

SEQ ID NO: 5529 - protein, 43 aa, Artificial Sequence
  Description of Artificial Sequence: Synthetic polypeptide
SGFTFSYYMMIWVRQAPGKGLEWVSGIVSSGGFTMYADSVKGR

SEQ ID NO: 5530 - protein, 43 aa, Artificial Sequence
  Description of Artificial Sequence: Synthetic polypeptide
SGFTFSYYMMWWVRQAPGKGLEWVSSISSSGGGTFYADSVKGR

SEQ ID NO: 5531 - protein, 43 aa, Artificial Sequence
  Description of Artificial Sequence: Synthetic polypeptide
SGFTFSYYMMWWVRQAPGKGLEWVSSIYSSGGATFYADSVKGR

SEQ ID NO: 5532 - protein, 43 aa, Artificial Sequence
  Description of Artificial Sequence: Synthetic polypeptide
SGFTFSYYNMWWVRQAPGKGLEWVSSISPSGGGTYYADSVKGR

SEQ ID NO: 5533 - protein, 43 aa, Artificial Sequence
  Description of Artificial Sequence: Synthetic polypeptide
SGFTFSYYPMFWVRQAPGKGLEWVSYISPSGGWTDYADSVKGR

SEQ ID NO: 5534 - protein, 43 aa, Artificial Sequence
  Description of Artificial Sequence: Synthetic polypeptide
SGFTFSYYPMIWVRQAPGKGLEWVSWISPSGGGTQYADSVKGR

SEQ ID NO: 5535 - protein, 42 aa, Artificial Sequence
  Description of Artificial Sequence: Synthetic polypeptide
SGFTFSYYPMVWVRQAPGKGLEWVSYIWPSGGTYYADSVKGR

SEQ ID NO: 5536 - protein, 43 aa, Artificial Sequence
  Description of Artificial Sequence: Synthetic polypeptide
SGFTFSYYPMWWVRQAPGKGLEWVSSIVPSGGATFYADSVKGR

SEQ ID NO: 5537 - protein, 43 aa, Artificial Sequence
  Description of Artificial Sequence: Synthetic polypeptide
SGFTFSYYPMWWVRQAPGKGLEWVSVIYPSGGATFYADSVKGR

SEQ ID NO: 5538 - protein, 43 aa, Artificial Sequence
  Description of Artificial Sequence: Synthetic polypeptide
SGFTFSYYPMWWVRQAPGKGLEWVSYISSSGGGTHYADSVKGR

SEQ ID NO: 5539 - protein, 43 aa, Artificial Sequence
  Description of Artificial Sequence: Synthetic polypeptide
SGFTFSYYPMWWVRQAPGKGLEWVSYIVPSGGATFYADSVKGR

SEQ ID NO: 5540 - protein, 107 aa, Artificial Sequence
  Description of Artificial Sequence: Synthetic polypeptide
EIVLTQSPATLSLSPGERATLSCRASQSISSFLAWYQQKPGQAPRLLIYDASYRATGIPARFSGSGSGTDFTLTISSLEPEDFAVYYCQQRGNWPITFGQGTRLEIK

SEQ ID NO: 5541 - protein, 105 aa, Homo sapiens
EIVLTQSPATLSLSPGERATLSCRASQSVSSYLAWYQQKPGQAPRLLIYDASNRATGIPARFSGSGSGTDFTLTISSLEPEDFAVYYCQQRSNWPFGQGTRLEIK

SEQ ID NO: 5542 - protein, 107 aa, Artificial Sequence
  Description of Artificial Sequence: Synthetic polypeptide
DIQMTQSPATLSLSPGERATLSCRASQSISSFLAWYQQKPGQAPRLLIYDASYRATGIPARFSGSGSGTDFTLTISSLEPEDYAVYYCQQRGNWPITFGQGTRLEIK

SEQ ID NO: 5543 - protein, 105 aa, Homo sapiens; identical to SEQ ID NO: 5541

SEQ ID NO: 5544 - protein, 8 aa, Artificial Sequence
  Description of Artificial Sequence: Synthetic peptide
  MOD_RES (1)..(1): Mca-Lys
  MOD_RES (6)..(6): Dap(Dnp)
  C-term amidated
KPLGLXAR

SEQ ID NO: 5545 - protein, 11 aa, Artificial Sequence
  Description of Artificial Sequence: Synthetic peptide
RASQSISSFLA

SEQ ID NO: 5546 - protein, 7 aa, Artificial Sequence
  Description of Artificial Sequence: Synthetic peptide
DASYRAT

SEQ ID NO: 5547 - protein, 9 aa, Artificial Sequence
  Description of Artificial Sequence: Synthetic peptide
QQRGNWPIT

SEQ ID NO: 5548 - protein, 5 aa, Artificial Sequence
  Description of Artificial Sequence: Synthetic peptide
HYDMW

SEQ ID NO: 5549 - protein, 17 aa, Artificial Sequence
  Description of Artificial Sequence: Synthetic peptide
VIYSSGGPTFYADSVKG

SEQ ID NO: 5550 - protein, 15 aa, Artificial Sequence
  Description of Artificial Sequence: Synthetic peptide
DRAYGDYVGWNGFDY

SEQ ID NO: 5551 - protein, 11 aa, Artificial Sequence
  Description of Artificial Sequence: Synthetic peptide
RASQSISSFLA

SEQ ID NO: 5552 - protein, 7 aa, Artificial Sequence
  Description of Artificial Sequence: Synthetic peptide
DASYRAT

SEQ ID NO: 5553 - protein, 9 aa, Artificial Sequence
  Description of Artificial Sequence: Synthetic peptide
QQRGNWPIT

SEQ ID NO: 5554 - protein, 5 aa, Artificial Sequence
  Description of Artificial Sequence: Synthetic peptide
WYDMW

SEQ ID NO: 5555 - protein, 17 aa, Artificial Sequence
  Description of Artificial Sequence: Synthetic peptide
VIYSSGGPTFYADSVKG

SEQ ID NO: 5556 - protein, 15 aa, Artificial Sequence
  Description of Artificial Sequence: Synthetic peptide
DRAYGDYVGWNGFDY

SEQ ID NO: 5557 - protein, 11 aa, Artificial Sequence
  Description of Artificial Sequence: Synthetic peptide
RASQSISSFLA

SEQ ID NO: 5558 - protein, 7 aa, Artificial Sequence
  Description of Artificial Sequence: Synthetic peptide
DASYRAT

SEQ ID NO: 5559 - protein, 9 aa, Artificial Sequence
  Description of Artificial Sequence: Synthetic peptide
QQRGNWPIT

SEQ ID NO: 5560 - protein, 5 aa, Artificial Sequence
  Description of Artificial Sequence: Synthetic peptide
VYDMW

SEQ ID NO: 5561 - protein, 17 aa, Artificial Sequence
  Description of Artificial Sequence: Synthetic peptide
VIYPSGGATYYADSVKG

SEQ ID NO: 5562 - protein, 15 aa, Artificial Sequence
  Description of Artificial Sequence: Synthetic peptide
DRAYGDYVGWNGFDY

SEQ ID NO: 5563 - protein, 11 aa, Artificial Sequence
  Description of Artificial Sequence: Synthetic peptide
RASQSISSFLA

SEQ ID NO: 5564 - protein, 7 aa, Artificial Sequence
  Description of Artificial Sequence: Synthetic peptide
DASYRAT

SEQ ID NO: 5565 - protein, 9 aa, Artificial Sequence
  Description of Artificial Sequence: Synthetic peptide
QQRGNWPIT

SEQ ID NO: 5566 - protein, 5 aa, Artificial Sequence
  Description of Artificial Sequence: Synthetic peptide
QYDMW

SEQ ID NO: 5567 - protein, 16 aa, Artificial Sequence
  Description of Artificial Sequence: Synthetic peptide
VIYPSGTTFYADSVKG

SEQ ID NO: 5568 - protein, 15 aa, Artificial Sequence
  Description of Artificial Sequence: Synthetic peptide
DRAYGDYVGWNGFDY

SEQ ID NO: 5569 - protein, 11 aa, Artificial Sequence
  Description of Artificial Sequence: Synthetic peptide
RASQSISSFLA

SEQ ID NO: 5570 - protein, 7 aa, Artificial Sequence
  Description of Artificial Sequence: Synthetic peptide
DASYRAT

SEQ ID NO: 5571 - protein, 9 aa, Artificial Sequence
  Description of Artificial Sequence: Synthetic peptide
QQRGNWPIT

SEQ ID NO: 5572 - protein, 5 aa, Artificial Sequence
  Description of Artificial Sequence: Synthetic peptide
LYDMW

SEQ ID NO: 5573 - protein, 17 aa, Artificial Sequence
  Description of Artificial Sequence: Synthetic peptide
VIYSSGGYTGYADSVKG

SEQ ID NO: 5574 - protein, 15 aa, Artificial Sequence
  Description of Artificial Sequence: Synthetic peptide
DRAYGDYVGWNGFDY

SEQ ID NO: 5575 - protein, 107 aa, Artificial Sequence; identical to SEQ ID NO: 5540
  Description of Artificial Sequence: Synthetic polypeptide

SEQ ID NO: 5576 - protein, 124 aa, Artificial Sequence; identical to SEQ ID NO: 17
  Description of Artificial Sequence: Synthetic polypeptide

SEQ ID NO: 5577 - protein, 107 aa, Artificial Sequence; identical to SEQ ID NO: 5540
  Description of Artificial Sequence: Synthetic polypeptide

SEQ ID NO: 5578 - protein, 124 aa, Artificial Sequence; identical to SEQ ID NO: 1183
  Description of Artificial Sequence: Synthetic polypeptide

SEQ ID NO: 5579 - protein, 107 aa, Artificial Sequence; identical to SEQ ID NO: 5540
  Description of Artificial Sequence: Synthetic polypeptide

SEQ ID NO: 5580 - protein, 124 aa, Artificial Sequence; identical to SEQ ID NO: 1139
  Description of Artificial Sequence: Synthetic polypeptide

SEQ ID NO: 5581 - protein, 107 aa, Artificial Sequence; identical to SEQ ID NO: 5540
  Description of Artificial Sequence: Synthetic polypeptide

SEQ ID NO: 5582 - protein, 123 aa, Artificial Sequence; identical to SEQ ID NO: 935
  Description of Artificial Sequence: Synthetic polypeptide

SEQ ID NO: 5583 - protein, 107 aa, Artificial Sequence; identical to SEQ ID NO: 5540
  Description of Artificial Sequence: Synthetic polypeptide

SEQ ID NO: 5584 - protein, 124 aa, Artificial Sequence; identical to SEQ ID NO: 701
  Description of Artificial Sequence: Synthetic polypeptide

SEQ ID NO: 5585 - protein, 11 aa, Artificial Sequence
  Description of Artificial Sequence: Synthetic peptide
KASHSISRNLA

SEQ ID NO: 5586 - protein, 7 aa, Artificial Sequence
  Description of Artificial Sequence: Synthetic peptide
GASTRAT

SEQ ID NO: 5587 - protein, 9 aa, Artificial Sequence
  Description of Artificial Sequence: Synthetic peptide
QQRRNWPVT

SEQ ID NO: 5588 - protein, 5 aa, Artificial Sequence
  Description of Artificial Sequence: Synthetic peptide
QYPMW

SEQ ID NO: 5589 - protein, 17 aa, Artificial Sequence
  Description of Artificial Sequence: Synthetic peptide
YIVPSGGRTYYADSVKG

SEQ ID NO: 5590 - protein, 15 aa, Artificial Sequence
  Description of Artificial Sequence: Synthetic peptide
DRAYGDYVGWNGFDY

SEQ ID NO: 5591 - protein, 11 aa, Artificial Sequence
  Description of Artificial Sequence: Synthetic peptide
RASQSVSSNLA

SEQ ID NO: 5592 - protein, 7 aa, Artificial Sequence
  Description of Artificial Sequence: Synthetic peptide
GASTRAT

SEQ ID NO: 5593 - protein, 9 aa, Artificial Sequence
  Description of Artificial Sequence: Synthetic peptide
QQRRNWPVT

SEQ ID NO: 5594 - protein, 5 aa, Artificial Sequence
  Description of Artificial Sequence: Synthetic peptide
QYPMW

SEQ ID NO: 5595 - protein, 17 aa, Artificial Sequence
  Description of Artificial Sequence: Synthetic peptide
YIVPSGGRTYYADSVKG

SEQ ID NO: 5596 - protein, 15 aa, Artificial Sequence
  Description of Artificial Sequence: Synthetic peptide
DRAYGDYVGWNGFDY

SEQ ID NO: 5597 - protein, 11 aa, Artificial Sequence
  Description of Artificial Sequence: Synthetic peptide
RASQSVSSYLA

SEQ ID NO: 5598 - protein, 7 aa, Artificial Sequence
  Description of Artificial Sequence: Synthetic peptide
GASTRVT

SEQ ID NO: 5599 - protein, 9 aa, Artificial Sequence
  Description of Artificial Sequence: Synthetic peptide
QQRSSWPIT

SEQ ID NO: 5600 - protein, 5 aa, Artificial Sequence
  Description of Artificial Sequence: Synthetic peptide
QYPMW

SEQ ID NO: 5601 - protein, 17 aa, Artificial Sequence
  Description of Artificial Sequence: Synthetic peptide
YIVPSGGRTYYADSVKG

SEQ ID NO: 5602 - protein, 15 aa, Artificial Sequence
  Description of Artificial Sequence: Synthetic peptide
DRAYGDYVGWNGFDY

SEQ ID NO: 5603 - protein, 11 aa, Artificial Sequence
  Description of Artificial Sequence: Synthetic peptide
RASQSVSSDLA

SEQ ID NO: 5604 - protein, 7 aa, Artificial Sequence
  Description of Artificial Sequence: Synthetic peptide
GASTRAT

SEQ ID NO: 5605 - protein, 9 aa, Artificial Sequence
  Description of Artificial Sequence: Synthetic peptide
QQRSNWPVT

SEQ ID NO: 5606 - protein, 5 aa, Artificial Sequence
  Description of Artificial Sequence: Synthetic peptide
QYPMW

SEQ ID NO: 5607 - protein, 17 aa, Artificial Sequence
  Description of Artificial Sequence: Synthetic peptide
YIVPSGGRTYYADSVKG

SEQ ID NO: 5608 - protein, 15 aa, Artificial Sequence
  Description of Artificial Sequence: Synthetic peptide
DRAYGDYVGWNGFDY

SEQ ID NO: 5609 - protein, 108 aa, Artificial Sequence
  Description of Artificial Sequence: Synthetic polypeptide
QDIQMTQSPATLSVSPGERVTLSCKASHSISRNLAWYQQKPGQAPRLLIFGASTRATGIPARFSGSGSGTEFTLTISSLEAEDFAVYYCQQRRNWPVTFGPGTKLDFK

SEQ ID NO: 5610 - protein, 124 aa, Artificial Sequence; identical to SEQ ID NO: 7
  Description of Artificial Sequence: Synthetic polypeptide

SEQ ID NO: 5611 - protein, 108 aa, Artificial Sequence
  Description of Artificial Sequence: Synthetic polypeptide
QDIQMTQSPATLSVSPGERATLSCRASQSVSSNLAWYQQKPGQAPRLLIYGASTRATGIPARFSGSGSGTEFTLTISSLQSEDFAVYYCQQRRNWPVTFGQGTRLEII

SEQ ID NO: 5612 - protein, 124 aa, Artificial Sequence; identical to SEQ ID NO: 7
  Description of Artificial Sequence: Synthetic polypeptide

SEQ ID NO: 5613 - protein, 108 aa, Artificial Sequence
  Description of Artificial Sequence: Synthetic polypeptide
QDIQMTQSPGTLSVSPGERVTLSCRASQSVSSYLAWYQQKPGQAPRLLIYGASTRVTGIPARFSGSGSGTEFTLTISSLQSEDFAVYYCQQRSSWPITFGQGTRLEIK

SEQ ID NO: 5614 - protein, 124 aa, Artificial Sequence; identical to SEQ ID NO: 7
  Description of Artificial Sequence: Synthetic polypeptide

SEQ ID NO: 5615 - protein, 108 aa, Artificial Sequence
  Description of Artificial Sequence: Synthetic polypeptide
QDIQMTQSPAALSLSPGERATLSCRASQSVSSDLAWYQQKPGQAPRLLIYGASTRATGIPARFSGSRSGTAFTLTISSLEPEDFAVYYCQQRSNWPVTFGQGTKLEIK

SEQ ID NO: 5616 - protein, 124 aa, Artificial Sequence; identical to SEQ ID NO: 7
  Description of Artificial Sequence: Synthetic polypeptide

SEQ ID NO: 5617 - protein, 10 aa, Artificial Sequence
  Description of Artificial Sequence: Synthetic peptide
  MOD_RES (1)..(1): Mca-Arg
  MOD_RES (7)..(7): Nval
  MOD_RES (10)..(10): Lys(Dnp)
  C-term amidated
RPKPVEVWRK

SEQ ID NO: 5618 - protein, 7 aa, Artificial Sequence
  Description of Artificial Sequence: Synthetic peptide
  MOD_RES (1)..(1): Mca-Pro
  MOD_RES (4)..(4): Nva
  MOD_RES (5)..(5): Dap(Dnp)
  C-term amidated
PLAVXAR

SEQ ID NO: 5619 - protein, 12 aa, Artificial Sequence
  Description of Artificial Sequence: Synthetic peptide
  MOD_RES (1)..(1): Mca-Pro
  MOD_RES (7)..(7): Dpa
  C-term amidated
PLAQAVXRSSSR

1.-54. (canceled)

55. An isolated protein that binds is capable of binding to an MMP-9 or to an MMP-2, wherein the protein comprises an antibody comprising three heavy chain CDRs and three light chain CDRs from antibody X0106-A01, X0106-B02, X0106-C03, X0106-E04 or X0106-F05.

56. A method of inhibiting an interaction between MMP-9 or MMP-2 and an MMP-9 or MMP-2 substrate, respectively, the method comprising: contacting a protein of claim 55 with MMP-9 or MMP-2, wherein the binding protein binds to MMP-9 or MMP-2 and thereby prevents the binding of the MMP-9 or MMP-2 substrate to MMP-9 or MMP-2, respectively.

57. An MMP-9/MMP-2 binding protein-drug conjugate, wherein the conjugate comprises an MMP-9/MMP-2 binding protein of claim 55 and a drug.

58. A pharmaceutical composition comprising an MMP-9/MMP-2 binding protein of claim 55 and a pharmaceutically acceptable carrier.

59. A method of detecting an MMP-9 or MMP-2 in a sample, the method comprising:
contacting the sample with a protein of claim 55; and detecting an interaction between the protein and the MMP-9 or MMP-2, if present.

60. A method of modulating MMP-9 or MMP-2 activity, the method comprising:
contacting an MMP-9 or MMP-2 with a protein of claim 55, thereby modulating MMP-9 or MMP-2 activity.

61. A method for modulating metastatic activity in a subject, the method comprising:
administering a protein of claim 55 to the subject in an amount effective to modulate metastatic activity.

62. A method of treating cancer in a subject, the method comprising:
administering, a protein of claim 55 to the subject in an amount sufficient to treat a cancer in the subject.

63. A method of treating heart failure in a subject, the method comprising:
administering a protein of claim 55 to the subject in an amount sufficient to treat heart failure in the subject.

64. A method of treating septic shock in a subject, the method comprising:
administering a protein of claim 55 to the subject in an amount sufficient to treat septic shock in the subject.

65. A method of treating neuropathic pain in a subject, the method comprising:
administering a protein of claim 55 to the subject in an amount sufficient to treat neuropathic pain in the subject.

66. A method of treating inflammatory pain in a subject, the method comprising:
administering a protein of claim 55 to the subject in an amount sufficient to treat inflammatory pain in the subject.

67. A method of treating an ocular condition in a subject, the method comprising:
administering a protein of claim 55 to the subject in an amount sufficient to treat the ocular condition in the subject.

68. A method of treating an inflammatory disease in a subject, the method comprising:
administering a protein of claim 55 to the subject in an amount sufficient to treat the inflammatory disease in the subject.

69. A method of treating a skin blistering disorder in a subject, the method comprising:
administering a protein of claim 55 to the subject in an amount sufficient to treat the inflammatory disease in the subject.

70. A method of imaging a subject, the method comprising:
administering a protein of claim 55 to the subject, and
determining the presence of the protein in the subject.
